(19) United States
(12) Patent Application Publication
(10) Pub. No.: US 2004/0220128 A1
(43) Pub. Date: Nov. 4, 2004

(54) Nucleic acid based modulation of female reproductive diseases and conditions

(75) Inventors: Pamela Pavco, Lafayette, CO (US); Jennifer Lockridge, Westminster, CO (US); James McSwiggen, Boulder, CO (US)

Correspondence Address: MCDONNELL BOEHNEN HULBERT & BERGHOFF LLP, 300 S. WACKER DRIVE, 32ND FLOOR, CHICAGO, IL, 60606, US

(73) Assignees: Sirna Therapeutics, Inc., Boulder, CO (US); Chiron Corporation, Emeryville, CA (US)

(21) Appl. No.: 10/712,633

(22) Filed: Nov. 13, 2003

Related U.S. Application Data
(63) Continuation of application No. PCT/US02/17674, filed on May 29, 2002.
(63) Continuation-in-part of application No. 10/138,674, filed on May 3, 2002.
Application No. 10/138,674 is a continuation-in-part of application No. 09/870,161, filed on May 29, 2001, now abandoned.
Application No. 09/870,161 is a continuation-in-part of application No. 09/708,690, filed on Nov. 7, 2000, now abandoned.
Application No. 09/708,690 is a continuation-in-part of application No. 09/371,772, filed on Aug. 10, 1999, now Pat. No. 6,566,127.
Application No. 09/371,772 is a continuation-in-part of application No. 08/584,040, filed on Jan. 11, 1996, now Pat. No. 6,346,398.
(60) Provisional application No. 60/334,461, filed on Nov. 30, 2001.
(60) Provisional application No. 60/005,974, filed on Oct. 26, 1995.

(51) Int. Cl. A61K 48/00; C07H 21/02

(52) U.S. Cl. 514/44; 536/23.1

(57) ABSTRACT

The present invention relates to nucleic acid molecules, including dsRNA, siRNA, antisense, 2,5-A chimeras, aptamers, and enzymatic nucleic acid molecules, such as hammerhead ribozymes, DNAzymes, and allozymes, which modulate the expression of vascular endothelial growth factor receptor (VEGF) and/or vascular endothelial growth factor receptor (VEGFr) genes for the treatment and/or diagnosis of diseases and conditions associated with angiogenesis, such as cancer, tumor angiogenesis, or ocular indications such as diabetic retinopathy, or age related macular degeneration, proliferative diabetic retinopathy, hypoxia-induced angiogenesis, rheumatoid arthritis, psoriasis, wound healing, and female reproductive disorders and conditions, including but not limited to endometriosis, endometrial carcinoma, gynecologic bleeding disorders, irregular menstrual cycles, ovulation, premenstrual syndrome (PMS), and menopausal dysfunction.

[0001] This patent application is a continuation of Escobedo et al., PCT/US02/17674, filed May 29, 2002, which claims benefit of U.S. Ser. No. 60/334,461 filed Nov. 30, 2001 and which is a continuation-in-part of Pavco et al., U.S. Ser. No. 10/138,674, filed May 3, 2002, which is a continuation-in-part of Pavco et al., U.S. Ser. No. 09/870,161, filed May 29, 2001, abandoned, which is a continuation-in-part of Pavco et al., U.S. Ser. No. 09/708,690, filed Nov. 7, 2000, abandoned, which is a continuation-in-part of Pavco et al., U.S. Ser. No. 09/371,772, filed Aug. 10, 1999, now U.S. Pat. No. 6,566,127, which is a continuation-in-part of Pavco et al., U.S. Ser. No. 08/584,040, filed Jan. 11, 1996, now U.S. Pat. No. 6,346,398, which claims the benefit of Pavco et al., U.S. Ser. No. 60/005,974 filed Oct. 26, 1995. Each of these applications is hereby incorporated by reference in its entirety including the drawings and tables.

### TECHNICAL FIELD OF THE INVENTION

[0002] This invention relates to methods and reagents for the treatment of diseases or conditions relating to the levels of expression of vascular endothelial growth factor (VEGF) and vascular endothelial growth factor receptor(s). Specifically, the instant invention features nucleic-acid based molecules and methods that modulate the expression of vascular endothelial growth factor and/or vascular endothelial growth factor receptors, such as VEGFR1 and/or VEGFR2, that are useful in preventing, treating, controlling and/or diagnosing disorders and conditions related to angiogenesis, including but not limited to cancer, tumor angiogenesis, or ocular indications such as diabetic retinopathy, or age related macular degeneration, proliferative diabetic retinopathy, hypoxia-induced angiogenesis, rheumatoid arthritis, psoriasis, wound healing, endometriosis, endometrial carcinoma, gynecologic bleeding disorders, irregular menstrual cycles, ovulation, premenstrual syndrome (PMS), and menopausal dysfunction.

### BACKGROUND OF THE INVENTION

[0003] The following is a discussion of relevant art, none of which is admitted to be prior art to the present invention.

[0004] VEGF, also referred to as vascular permeability factor (VPF) and vasculotropin, is a potent and highly specific mitogen of vascular endothelial cells (for a review see Ferrara, 1993 Trends Cardiovas. Med. 3, 244; Neufeld et al., 1994, Prog. Growth Factor Res. 5, 89). VEGF-induced neovascularization is implicated in various pathological conditions such as tumor angiogenesis, or ocular indications such as diabetic retinopathy, or age related macular degeneration, proliferative diabetic retinopathy, hypoxia-induced angiogenesis, rheumatoid arthritis, psoriasis, wound healing and others.

[0005] VEGF, an endothelial cell-specific mitogen, is a 34-45 kDa glycoprotein with a wide range of activities that include promotion of angiogenesis, enhancement of vascular-permeability and others. VEGF belongs to the platelet-derived growth factor (PDGF) family of growth factors with approximately 18% homology with the A and B chain of PDGF at the amino acid level. Additionally, VEGF contains the eight conserved cysteine residues common to all growth factors belonging to the PDGF family (Neufeld et al., supra). VEGF protein is believed to exist predominantly as disulfide-linked homodimers; monomers of VEGF have been shown to be inactive (Plouet et al., 1989 EMBO J. 8, 3801).

[0006] VEGF exerts its influence on vascular endothelial cells by binding to specific high-affinity cell surface receptors. Covalent cross-linking experiments with ¹²⁵I-labeled VEGF protein have led to the identification of three high molecular weight complexes of 225, 195 and 175 kDa presumed to be VEGF and VEGF receptor complexes (Vaisman et al., 1990 J. Biol. Chem. 265, 19461). Based on these studies VEGF-specific receptors of 180, 150 and 130 kDa molecular mass were predicted. In endothelial cells, receptors of 150 and 130 kDa have been identified. The VEGF receptors belong to the superfamily of receptor tyrosine kinases (RTKs) characterized by a conserved cytoplasmic catalytic kinase domain and a hydrophilic kinase sequence. The extracellular domains of the VEGF receptors consist of seven immunoglobulin-like domains that are thought to be involved in VEGF binding functions.

[0007] The two most abundant and high-affinity receptors of VEGF are flt-1 (VEGFR1) (fms-like tyrosine kinase) cloned by Shibuya et al., 1990 Oncogene 5, 519 and KDR (VEGFR2) (kinase-insert-domain-containing receptor) cloned by Terman et al., 1991 Oncogene 6, 1677. The murine homolog of KDR, cloned by Mathews et al., 1991, Proc. Natl. Acad. Sci., USA, 88, 9026, shares 85% amino acid homology with KDR and is termed as flk-1 (fetal liver kinase-1). The high-affinity binding of VEGF to its receptors is modulated by cell surface-associated heparin and heparin-like molecules (Gitay-Goren et al., 1992 J. Biol. Chem. 267, 6093).

[0008] VEGF expression has been associated with several pathological states such as tumor angiogenesis, several forms of blindness, rheumatoid arthritis, psoriasis and others. In addition, a number of studies have demonstrated that VEGF is both necessary and sufficient for neovascularization. Takashita et al., 1995 J. Clin. Invest. 93, 662, demonstrated that a single injection of VEGF augmented collateral vessel development in a rabbit model of ischemia. VEGF also can induce neovascularization when injected into the cornea. Expression of the VEGF gene in CHO cells is sufficient to confer tumorigenic potential to the cells. Kim et al., supra and Millauer et al., supra used monoclonal antibodies against VEGF or a dominant negative form of VEGFR2 receptor to inhibit tumor-induced neovascularization.

[0009] During development, VEGF and its receptors are associated with regions of new vascular growth (Millauer et al., 1993 Cell 72, 835; Shalaby et al., 1993 J. Clin. Invest. 91, 2235). Furthermore, transgenic mice lacking either of the VEGF receptors are defective in blood vessel formation and these mice do not survive; VEGFR2 appears to be required for differentiation of endothelial cells, while VEGFR1 appears to be required at later stages of vessel formation (Shalaby et al., 1995 Nature 376, 62; Fung et al., 1995 Nature 376, 66). Thus, these receptors apparently need to be present to properly signal endothelial cells or their precursors to respond to vascularization-promoting stimuli.

[0010] Increasing evidence suggests that the VEGF family may also be involved with both the etiology and maintenance of peritoneal endometriosis. Peritoneal endometriosis is a significant debilitating gynecological problem of widespread prevalence. It is now generally accepted that the pathogenesis of peritoneal endometriosis involves the implantation of exfoliated endometrium. Maintenance of exfoliated endometrial tissue is dependent upon the generation and maintenance of an extensive blood supply both within and surrounding the ectopic tissue.

[0011] Endometriosis is a disease affecting an estimated 77 million women and teenagers worldwide. Endometriosis is a leading cause of infertility, chronic pelvic pain and hysterectomy. Endometriosis can be characterized when endometrial tissue (the tissue inside the uterus which builds up and is shed each month during menses) is found outside the uterus, in other areas of the body. The endometrial tissue can respond to hormonal commands each month and break down and bleed. However, unlike the endometrium, these tissue deposits have no way of leaving the body. The result is internal bleeding, degeneration of blood and tissue shed from the growths, inflammation of the surrounding areas, expression of irritating enzymes and formation of scar tissue. In addition, depending on the location of the growths, interference with the bowel, bladder, intestines and other areas of the pelvic cavity can occur. Endometrial tissue has even been found lodged in the skin and at other extrapelvic locations like the arm, leg and even brain.

[0012] Currently, the presence of Endometriosis can only be confirmed through surgery such as laparoscopy, but can be suspected based on symptoms, physical findings and diagnostic tests. Endometriosis can be treated in many different ways, both surgically and medically. Most commonly, surgery will be performed during which the disease will be excised, ablated, fulgarated, cauterized or otherwise removed, and adhesions will also be freed. Surgeries include but are not limited to laparoscopy; laparotomy; presacral and uterosacral and various levels of hysterectomies, where some or all of the reproductive organs are removed. Often, this method will only relieve the symptoms associated with growths on the reproductive organs, not the bowels or kidneys and related areas where Endometriosis can be present.

[0013] There are several drugs used to treat Endometriosis that are utilized either alone or in combination with surgery. These include contraceptives, GNRH agonists, and/or synthetic hormones. GnRH agonists are commonly used on women in all stages of the disease and may sometimes have serious side affects. GnRH (gonadotropin releasing hormone) analogues are classified into 2 groups: agonists and antagonists. Agonists are commonly used in the treatment of Endometriosis by suppressing the manufacture of follicle stimulating hormone (FSH) and luteinizing hormone (LH), common hormones required in ovulation. When they are not secreted, the body will go into “pseudo-menopause,” stalling the growth of more implants. However, these are again only stop-gap measures that can be utilized only for short term intervals. Once the body returns to it's normal state, the Endometriosis will again begin to implant itself.

[0014] Angiogenesis is likely to be involved in the pathogenesis of endometriosis. According to the transplantation theory, when the exfoliated endometrium is attached to the peritoneal layer, the establishment of a new blood supply is essential for the survival of the endometrial implant and development of endometriosis (Donnez et al., 1998, Hum. Reprod., 13, 1686-1690). Endometrial growth and repair after menstruation are associated with profound angiogenesis. Abnormalities in these processes result in excessive or unpredictable bleeding patterns and are common in many women. It is therefore important to understand which factors regulate normal endometrial angiogenesis. Vascular endothelial growth factor (VEGF) is an endothelial cell-specific mitogen that plays an important role in normal and pathological angiogenesis (Fasciani et al., 2000, Mol. Hum. Reprod., 6, 50-54; Sharkey et al., 2000, J. Clin. Endocrinol. Metab., 85, 402-409). Sources of this factor include the eutopic endometrium, ectopic endometriotic tissue and peritoneal fluid macrophages. Important to its etiology is the correct peritoneal environment in which the exfoliated endometrium is seeded and implants. Established ectopic tissue is then dependent on the peritoneal environment for its survival, an environment that supports angiogenesis. The increasing knowledge of the involvement of the VEGF family in endometriotic angiogenesis raises the possibility of novel approaches to its medical management, with particular focus on the anti-angiogenic control of the action of VEGF (McLaren, 2001, Hum. Reprod. Update, 6, 45-55).

[0015] Pavco et al., International PCT Publication No. WO 97/15662, describes methods and reagents for treating diseases or conditions related to levels of vascular endothelial growth factor receptor.

[0016] Robinson, International PCT Publication No. WO 95/04142, describes the use of certain antisense oligonucleotides targeted against VEGF RNA to inhibit VEGF expression.

[0017] Jellinek et al., 1994 Biochemistry 33, 10450 describe the use of specific VEGF-specific high-affinity RNA aptamers to inhibit the binding of VEGF to its receptors.

[0018] Rockwell and Goldstein, International PCT Publication No. WO 95/21868, describe the use of certain anti-VEGF receptor monoclonal antibodies to neutralize the effect of VEGF on endothelial cells.

[0019] Pappa, International PCT Publication No. WO 01/32920, describes inhibitors, including certain ribozyme and antisense nucleic acid molecules, of specific genes, including cathepsin D, AEBP-1, stromelysin-3, cystatin B, protease inhibitor 1, sFRP4, gelsolin, IGFBP-3, dual specificity phosphatase 1, PAEP, Ig gamma chain, ferritin, complement component 3, pro-alpha-1 type III collagen, proline 4-hydroxylase, alpha-2 type I collagen, claudin-4, melanoma adhesion protein, procollagen C-endopeptidase enhancer, nascent-polypeptide-associated complex alpha polypeptide, elongation factor 1 alpha (EF-1-alpha), vitamin D3 25 hydroxylase, CSRP-1, steroidogenic acute regulatory protein, apolipoprotein E, transcobalamin II, prosaposin, early growth response 1 (EGR1), ribosomal protein S6, adenosine deaminase RNA-specific protein, RAD21, guanine nucleotide binding protein beta polypeptide 2-like 1 (RACK1) and podocalyxin genes which are all differentially expressed in tissues within individual patients with endometriosis.

[0020] Labarbera et al., International PCT Publication No. WO 00/73416, describes specific antisense nucleic acid molecules targeting follicle-stimulating hormone receptor.

[0021] Storella et al., International PCT Publication No. WO 99/63116, describes modulators of Prothymosin gene products for treating endometriosis, including certain ribozymes and antisense nucleic acid molecules.

### SUMMARY OF THE INVENTION

[0022] This invention features nucleic acid-based molecules, for example, enzymatic nucleic acid molecules, allozymes, antisense nucleic acids, 2-5A antisense chimeras, triplex forming oligonucleotides, decoy RNA, dsRNA, siRNA, aptamers, and antisense nucleic acids containing nucleic acid cleaving chemical groups, and methods to modulate vascular endothelial growth factor (VEGF) and/or vascular endothelial growth factor receptor (VEGFr) gene expression. Non-limiting examples of genes that encode vascular endothelial growth factor receptors of the invention include VEGFR1, VEGFR2 or combinations thereof. In particular, the instant invention features nucleic acid-based molecules and methods that modulate the expression of vascular endothelial growth factor and/or vascular endothelial growth factor receptors, such as VEGFR1 and/or VEGFR2, that are useful in preventing, treating, controlling, and/or diagnosing angiogenesis related diseases and conditions, including but not limited to tumor angiogenesis, cancers such as breast cancer, lung cancer, colorectal cancer, renal cancer, pancreatic cancer, or melanoma, or ocular indications such as diabetic retinopathy, or age related macular degeneration, and female reproductive disorders and conditions, including but not limited to endometriosis, endometrial carcinoma, gynecologic bleeding disorders, irregular menstrual cycles, ovulation, premenstrual syndrome (PMS), and menopausal dysfunction.

[0023] In one embodiment, the invention features one or more nucleic acid-based molecules and methods that independently or in combination modulate the expression of gene(s) encoding vascular endothelial growth factor receptors. Specifically, the present invention features nucleic acid molecules that modulate the expression of VEGF (for example Genbank Accession No. NM_{—}003376), VEGFR1 receptor (for example Genbank Accession No. NM_{—}002019), and VEGFR2 receptor (for example Genbank Accession No. NM_{—}002253) that are useful in preventing, treating, controlling, and/or diagnosing tumor angiogenesis, cancers such as breast cancer, lung cancer, colorectal cancer, renal cancer, pancreatic cancer, or melanoma, or ocular indications such as diabetic retinopathy, or age related macular degeneration, and female reproductive disorders and conditions, including but not limited to endometriosis, endometrial carcinoma, gynecologic bleeding disorders, irregular menstrual cycles, ovulation, premenstrual syndrome (PMS), and menopausal dysfunction.

[0024] In one embodiment, the present invention features a compound having Formula I: (SEQ ID NO: 5977)

5′ gₛaₛgₛuₛugcUGAuGagg ccgaaa ggccGaaAgucugB 3′

[0025] wherein each a is 2′-O-methyl adenosine nucleotide, each g is a 2′-O-methyl guanosine nucleotide, each c is a 2′-O-methyl cytidine nucleotide, each u is a 2′-O-methyl uridine nucleotide, each A is adenosine, each G is guanosine, each s individually represents a phosphorothioate internucleotide linkage, U is 2′-deoxy-2′-C-allyl uridine, and B is an inverted deoxyabasic moiety. This compound is also referred to as ANGIOZYME™ ribozyme.

[0026] In another embodiment, the present invention features a compound having Formula II: (SEQ ID NO: 5978).

5′-uₛaₛcₛ aₛau ucU GAu Gag gcg
aaa gcc Gaa Aag aca aB-3′

[0027] wherein each a is 2′-O-methyl adenosine nucleotide, each g is a 2′-O-methyl guanosine nucleotide, each c is a 2′-O-methyl cytidine nucleotide, each u is a 2′-O-methyl uridine nucleotide, each A is adenosine, each G is guanosine, each s individually represents a phosphorothioate internucleotide linkage, U is 2′-deoxy-2′-C-allyl uridine, and B is an inverted deoxyabasic moiety.

[0028] In one embodiment, the invention features a composition comprising a nucleic acid molecule of the invention in a pharmaceutically acceptable carrier. In another embodiment, the invention features a composition comprising a compound of Formula I and/or Formula II in a pharmaceutically acceptable carrier or diluent.

[0029] In one embodiment, the invention features a method of administering to a cell, for example a mammalian cell, including a human cell, a nucleic acid molecule of the invention comprising contacting the cell with the nucleic acid molecule under conditions suitable for administration, for example in the presence of a delivery reagent such as a lipid, cationic lipid, phospholipid, or liposome. In another embodiment, the invention features a method of administering to a cell, for example a mammalian cell, including a human cell, a compound of Formula I and/or Formula II comprising contacting the cell with the compound under conditions suitable for administration, for example in the presence of a delivery reagent such as a lipid, cationic lipid, phospholipid, or liposome.

[0030] In one embodiment, the present invention features a mammalian cell comprising a nucleic acid molecule of the invention, wherein the mammalian cell is, for example, a human cell. In another embodiment, the present invention also features a mammalian cell comprising the compound of Formula I and/or Formula II, wherein the mammalian cell is, for example, a human cell.

[0031] In one embodiment, the invention features a method of inhibiting angiogenesis, for example tumor angiogenesis, or ocular indications such as diabetic retinopathy, or age related macular degeneration, or endometrial neovascularization, in a subject comprising contacting the subject with a nucleic acid molecule of the invention, under conditions suitable for the inhibition. In another embodiment, the invention features a method of inhibiting angiogenesis, for example tumor angiogenesis, or ocular indications such as diabetic retinopathy, or age related macular degeneration, or endometrial neovascularization, in a subject, comprising contacting the subject with a compound of Formula I and/or Formula II, under conditions suitable for the inhibition.

[0032] In another embodiment, the invention features a method of treatment of a subject having an ocular condition associated with the increased level of a VEGF receptor, for example diabetic retinopathy, or age related macular degeneration, comprising contacting cells of the subject with a nucleic acid molecule, such as an enzymatic nucleic acid molecule targeted against a VEGF receptor RNA, e.g., molecule according to Formula I and/or II, under conditions suitable for the treatment.

[0033] In another embodiment, the invention features a method of treatment of a subject having a condition associated with an increased level of VEGR and/or a VEGF receptor, for example tumor angiogenesis, cancers such as breast cancer, lung cancer, colorectal cancer, renal cancer, pancreatic cancer, or melanoma, ocular diseases or ocular indications such as diabetic retinopathy, or age related macular degeneration, rhuematoid arthritis, psoriasis endometriosis, endometrial carcinoma, gynecologic bleeding disorders, irregular menstrual cycles, ovulation, premenstrual syndrome (PMS), or menopausal dysfunction, comprising contacting cells of the subject with a nucleic acid molecule of the invention, such as a compound of Formula I and/or Formula II, under conditions suitable for the treatment.

[0034] In yet another embodiment, the inventive method of treatment further comprises the use of one or more drug therapies under conditions suitable for the treatment. Non-limiting examples of other drug therapies that can be used in combination with nucleic acid molecules of the invention include to 5-fluoro uridine, Leucovorin, Irinotecan (CAMPTOSAR® or CPT-11 or Camptothecin-11 or Campto), Paclitaxel, or Carboplatin, GNRH (gonadotropin releasing hormone) agonists, Lupron Depot (Leuprolide Acetate), Synarel (naferalin acetate), Zolodex (goserelin acetate), Suprefact (buserelin acetate), Danazol, or oral contraceptives including but not limited to Depo-Provera or Provera (medroxyprogesterone acetate), or any other estrogen/progesterone contraceptive.

[0035] In one embodiment, the invention features a method of administering to a mammal, for example a human, a nucleic acid molecule of the invention comprising contacting the mammal with the nucleic acid molecule under conditions suitable for the administration, for example, in the presence of a delivery reagent such as a lipid, cationic lipid, phospholipid, or liposome. In another embodiment, the invention features a method of administering to a mammal, for example a human, a compound of Formula I and/or Formula II comprising contacting the mammal with the compound under conditions suitable for the administration, for example, in the presence of a delivery reagent such as a lipid, cationic lipid, phospholipid, or liposome.

[0036] In one embodiment, the invention features a nucleic acid molecule which down regulates expression of a vascular endothelial growth factor (VEGF) and/or vascular endothelial growth factor receptor (VEGFr) gene, for example, wherein the VEGFr gene comprises VEGFR1 or VEGFR2 and any combination thereof.

[0037] In one embodiment, a nucleic acid molecule of the invention, such as an enzymatic nucleic acid molecule, antisense nucleic acid molecule, 2-5A antisense chimera, triplex forming oligonucleotide, decoy RNA, dsRNA, siRNA, aptamer, or antisense nucleic acid containing nucleic acid cleaving chemical groups, is adapted to treat, control and/or diagnose tumor angiogenesis, cancers such as breast cancer, lung cancer, colorectal cancer, renal cancer, pancreatic cancer, or melanoma, ocular diseases or ocular indications, such as diabetic retinopathy, or age related macular degeneration, rhuematoid arthritis, psoriasis endometriosis, endometrial carcinoma, gynecologic bleeding disorders, irregular menstrual cycles, ovulation, premenstrual syndrome (PMS), or menopausal dysfunction.

[0038] Such nucleic acid molecules are also useful for the prevention of the diseases and conditions including diabetic retinopathy, macular degeneration, neovascular glaucoma, myopic degeneration, verruca vulgaris, angiofibroma of tuberous sclerosis, port-wine stains, Sturge Weber syndrome, Kippel-Trenaunay-Weber syndrome, Osler-Weber-Rendu syndrome and other diseases or conditions that are related to the levels of VEGFR1 or VEGFR2 in a cell or tissue.

[0039] In another embodiment, the invention features a composition in a pharmaceutically acceptable carrier or diluent, comprising the nucleic acid molecule of the instant invention.

[0040] In another embodiment, an enzymatic nucleic acid molecule, antisense nucleic acid molecule, 2-5A antisense chimera, triplex forming oligonucleotide, decoy RNA, dsRNA, siRNA, aptamer, or antisense nucleic acid containing nucleic acid cleaving chemical groups of the invention is adapted for birth control.

[0041] In one embodiment, an enzymatic nucleic acid molecule of the invention is in a hammerhead, Inozyme, Zinzyme, DNAzyme, Amberzyme, or G-cleaver configuration.

[0042] In one embodiment, an enzymatic nucleic acid molecule of the invention comprises between 8 and 100 bases complementary to RNA of VEGFR1 and/or VEGFR2 gene. In another embodiment, an enzymatic nucleic acid molecule of the invention comprises between 14 and 24 bases complementary to RNA of VEGFR1 and/or VEGFR2 gene.

[0043] In one embodiment, a siRNA molecule of the invention comprises a double stranded RNA wherein one strand of the RNA is complementary to RNA of a VEGFR1 and/or VEGFR2 gene. In another embodiment, a siRNA molecule of the invention comprises a double stranded RNA wherein one strand of the RNA comprises a portion of a sequence of RNA having a VEGFR1 and/or VEGFR2 sequence. In yet another embodiment, a siRNA molecule of the invention comprises a double stranded RNA wherein both strands of RNA are connected by a non-nucleotide linker. Alternately, a siRNA molecule of the invention comprises a double stranded RNA wherein both strands of RNA are connected by a nucleotide linker, such as a loop or stem loop structure.

[0044] In one embodiment, a single strand component of a siRNA molecule of the invention is from about 14 to about 50 nucleotides in length. In another embodiment, a single strand component of a siRNA molecule of the invention is about 14, 15, 16, 17, 18, 19, 20, 21, 22, 23, 24, 25, 26, 27, or 28 nucleotides in length. In yet another embodiment, a single strand component of a siRNA molecule of the invention is about 23 nucleotides in length. In one embodiment, a siRNA molecule of the invention is from about 28 to about 56 nucleotides in length. In another embodiment, a siRNA molecule of the invention is about 40, 41, 42, 43, 44, 45, 46, 47, 48, 49, 50, 51, or 52 nucleotides in length. In yet another embodiment, a siRNA molecule of the invention is about 46 nucleotides in length.

[0045] In one embodiment, an enzymatic nucleic acid molecule, antisense nucleic acid molecule, 2-5A antisense chimera, triplex forming oligonucleotide, decoy RNA, dsRNA, siRNA, aptamer, or antisense nucleic acid containing nucleic acid cleaving chemical groups of the invention is chemically synthesized.

[0046] In another embodiment, an enzymatic nucleic acid molecule, antisense nucleic acid molecule, 2-5A antisense chimera, triplex forming oligonucleotide, decoy RNA, dsRNA, siRNA, aptamer, or antisense nucleic acid containing nucleic acid cleaving chemical groups of the invention comprises at least one 2′-sugar modification.

[0047] In another embodiment, an enzymatic nucleic acid molecule, antisense nucleic acid molecule, 2-5A antisense chimera, triplex forming oligonucleotide, decoy RNA, dsRNA, siRNA, aptamer, or antisense nucleic acids containing nucleic acid cleaving chemical groups of the invention comprises at least one nucleic acid base modification.

[0048] In another embodiment, an enzymatic nucleic acid molecule, antisense nucleic acid molecule, 2-5A antisense chimera, triplex forming oligonucleotide, decoy RNA, dsRNA, siRNA, aptamer, or antisense nucleic acid containing nucleic acid cleaving chemical groups of the invention comprises at least one phosphate backbone modification.

[0049] In one embodiment, the invention features a mammalian cell, for example a human cell, comprising a nucleic acid molecule of the invention.

[0050] In another embodiment, the invention features a method of reducing VEGF and/or VEGFr, such as VEGFR1 and/or VEGFR2 expression or activity in a cell comprising contacting the cell with a nucleic acid molecule of the invention that modulates the expression and/or activity of VEGF and/or VEGFr, under conditions suitable for the reduction.

[0051] In another embodiment, a method of treatment of a subject having a condition associated with the level of VEGF and/or VEGFr, such as VEGFR1 and/or VEGFR2 is featured, wherein the method further comprises the use of one or more drug therapies under conditions suitable for the treatment.

[0052] In one embodiment, the invention features a method for treatment of a subject having tumor angiogenesis, tumor angiogenesis, cancers including but not limited to tumor and cancer types shown under Diagnosis in Table III, ocular diseases or ocular indications such as diabetic retinopathy, or age related macular degeneration, rhuematoid arthritis, psoriasis and/or endometriosis, endometrial carcinoma, gynecologic bleeding disorders, irregular menstrual cycles, ovulation, premenstrual syndrome (PMS), or menopausal dysfunction, comprising administering to the subject a nucleic acid molecule of the invention that modulates the expression and/or activity of VEGF and/or VEGFr under conditions suitable for the treatment.

[0053] In another embodiment, the invention features a method for birth control in a subject comprising administering to the subject a nucleic acid molecule of the invention that modulates the expression and/or activity of VEGF and/or VEGFr under conditions suitable for the treatment.

[0054] In another embodiment, the invention features a method of cleaving RNA encoded by a VEGF, VEGFR1 and/or VEGFR2 gene comprising contacting an enzymatic nucleic acid molecule of the invention having endonuclease activity with RNA encoded by a VEGFR1 and/or VEGFR2 gene under conditions suitable for the cleavage, for example, wherein the cleavage is carried out in the presence of a divalent cation, such as Mg²⁺.

[0055] In one embodiment, a nucleic acid molecule of the invention comprises a cap structure, for example a 3′,3′-linked or 5′,5′-linked deoxyabasic ribose derivative, wherein the cap structure is at the 5′-end, or 3′-end, or both the 5′-end and the 3′-end of the enzymatic nucleic acid molecule.

[0056] In another embodiment, a nucleic acid molecule of the invention comprises a cap structure, for example a 3′,3′-linked or 5′,5′-linked deoxyabasic ribose derivative, wherein the cap structure is at the 5′-end, or 3′-end, or both the 5′-end and the 3′-end of the antisense nucleic acid molecule.

[0057] In one embodiment, the invention features an expression vector comprising a nucleic acid sequence encoding at least one nucleic acid molecule of the invention such that the vector allows expression of the nucleic acid molecule.

[0058] In another embodiment, the invention features a mammalian cell, for example, a human cell comprising an expression vector of the invention.

[0059] In yet another embodiment, an expression vector of the invention further comprises a sequence for a nucleic acid molecule complementary to RNA encoded by a VEGF and/or VEGFr, such as VEGFR1 and/or VEGFR2 gene.

[0060] In one embodiment, an expression vector of the invention comprises a nucleic acid sequence encoding two or more nucleic acid molecules of the invention, which can be the same or different.

[0061] In another embodiment, the invention features a method for treatment or control of tumor angiogenesis, cancers such as breast cancer, lung cancer, colorectal cancer, renal cancer, pancreatic cancer, or melanoma, or ocular indications such as diabetic retinopathy, or age related macular degeneration, and/or endometriosis, endometrial carcinoma, gynecologic bleeding disorders, irregular menstrual cycles, ovulation, premenstrual syndrome (PMS), or menopausal dysfunction, comprising administering to a subject a nucleic acid molecule of the invention that modulates the expression and/or activity of VEGF and/or VEGFr, such as an enzymatic nucleic acid molecule, antisense nucleic acid molecule, 2-5A antisense chimera, triplex forming oligonucleotide, decoy RNA, dsRNA, siRNA, aptamer, or antisense nucleic acid containing nucleic acid cleaving chemical groups of the invention, under conditions suitable for the treatment, including administering to the subject one or more other therapies, for example, 5-fluoro uridine, Leucovorin, Irinotecan (CAMPTOSAR® or CPT-11 or Camptothecin-11 or Campto), Paclitaxel, or Carboplatin.GnRH (gonadotropin releasing hormone) agonists, Lupron Depot (Leuprolide Acetate), Synarel (naferalin acetate), Zolodex (goserelin acetate), Suprefact (buserelin acetate), Danazol, or oral contraceptives including but not limited to Depo-Provera or Provera (medroxyprogesterone acetate), or any other estrogen/progesterone contraceptive.

[0062] In one embodiment, the method of treatment features a nucleic acid molecule of the invention, such as an enzymatic nucleic acid or antisense nucleic acid molecule, that comprises at least five ribose residues, at least ten 2′-O-methyl modifications, and a 3′-end modification, such as a 3′-3′ inverted abasic moiety. In another embodiment, a nucleic acid molecule of the invention further comprises phosphorothioate linkages on at least three of the 5′ terminal nucleotides.

[0063] In another embodiment, the invention features a method of administering to a mammal, for example a human, an enzymatic nucleic acid molecule, antisense nucleic acid molecule, 2-5A antisense chimera, triplex forming oligonucleotide, decoy RNA, dsRNA, siRNA, aptamer, or antisense nucleic acid containing nucleic acid cleaving chemical groups of the invention, comprising contacting the mammal with the nucleic acid molecule under conditions suitable for the administration, for example, in the presence of a delivery reagent such as a lipid, cationic lipid, phospholipid, or liposome.

[0064] In yet another embodiment, the invention features a method of administering to a mammal an enzymatic nucleic acid molecule, antisense nucleic acid molecule, 2-5A antisense chimera, triplex forming oligonucleotide, decoy RNA, dsRNA, siRNA, aptamer, or antisense nucleic acid containing nucleic acid cleaving chemical groups of the invention in conjunction with other therapies, comprising contacting the mammal, for example a human, with the nucleic acid molecule and the other therapy under conditions suitable for the administration.

[0065] In another embodiment, other therapies contemplated by the instant invention that can be used in conjunction with the nucleic acid molecules of the instant invention include, but are not limited to, 5-fluoro uridine, Leucovorin, Irinotecan (CAMPTOSAR® or CPT-11 or Camptothecin-11 or Campto), Paclitaxel, or Carboplatin, GnRH (gonadotropin releasing hormone) agonists, Lupron Depot (Leuprolide Acetate), Synarel (naferalin acetate), Zolodex (goserelin acetate), Suprefact (buserelin acetate), Danazol, or oral contraceptives including but not limited to Depo-Provera or Provera (medroxyprogesterone acetate), or other estrogen/progesterone contraceptive.

[0066] In one embodiment, the invention features the use of an enzymatic nucleic acid molecule, to down-regulate the expression of VEGFR1 and/or VEGFR2 genes in the treatment or control of tumor angiogenesis, cancers such as breast cancer, lung cancer, colorectal cancer, renal cancer, pancreatic cancer, or melanoma, or ocular indications such as diabetic retinopathy, or age related macular degeneration, and/or endometriosis, endometrial carcinoma, gynecologic bleeding disorders, irregular menstrual cycles, ovulation, premenstrual syndrome (PMS), or menopausal dysfunction. Such enzymatic nucleic acid molecule can be in the hammerhead, NCH, G-cleaver, Amberzyme, Zinzyme, and/or DNAzyme motif.

[0067] In another embodiment, the invention features the use of an enzymatic nucleic acid molecule to down-regulate the expression of VEGF and/or VEGFr, such as VEGFR1 and/or VEGFR2 genes, as a method of birth control. Such enzymatic nucleic acid molecule can be in the hammerhead, NCH, G-cleaver, Amberzyme, Zinzyme, and/or DNAzyme motif. In one embodiment, the nucleic acid molecules of the invention have complementarity to the substrate sequences in Tables V and VI. Examples of enzymatic nucleic acid molecules of the invention are shown in Tables V and VI. Examples of such enzymatic nucleic acid molecules consist essentially of sequences defined in these Tables.

[0068] By “inhibit”, “down-regulate”, or “reduce”, it is meant that the expression of the gene, or level of nucleic acids or equivalent nucleic acids encoding one or more proteins or protein subunits, or activity of one or more proteins or protein subunits, such as VEGFR1, VEGFR2 and/or flk-1, is reduced below that observed in the absence of the nucleic acid molecules of the invention. In one embodiment, inhibition, down-regulation or reduction with enzymatic nucleic acid molecule preferably is below that level observed in the presence of an enzymatically inactive or attenuated molecule that is able to bind to the same site on the target nucleic acid, but is unable to cleave that nucleic acid. In another embodiment, inhibition, down-regulation, or reduction with antisense oligonucleotides is preferably below that level observed in the presence of, for example, an oligonucleotide with scrambled sequence or with mismatches. In another embodiment, inhibition, down-regulation, or reduction of VEGF and/or VEGFr, such as VEGFR1 and/or VEGFR2 with the nucleic acid molecule of the instant invention is greater in the presence of the nucleic acid molecule than in its absence.

[0069] By “up-regulate” is meant that the expression of a gene, or level of nucleic acids or equivalent nucleic acids encoding one or more proteins or protein subunits, or activity of one or more proteins or protein subunits, such as VEGFR1 and/or VEGFR2, is greater than that observed in the absence of the nucleic acid molecules of the invention. For example, the expression of a gene, such as VEGF and/or VEGFr, such as VEGFR1 and/or VEGFR2 gene, can be increased in order to treat, prevent, ameliorate, or modulate a pathological condition caused or exacerbated by an absence or low level of gene expression.

[0070] By “modulate” is meant that the expression of a gene, or level of nucleic acids or equivalent nucleic acids encoding one or more proteins or protein subunits, or activity of one or more proteins protein subunit(s) is up-regulated or down-regulated, such that the expression, level, or activity is greater than or less than that observed in the absence of the nucleic acid molecules of the invention.

[0071] By “enzymatic nucleic acid molecule” it is meant a nucleic acid molecule which has complementarity in a substrate binding region to a specified gene target, and also has an enzymatic activity which is active to specifically cleave a target nucleic acid. That is, the enzymatic nucleic acid molecule is able to intermolecularly cleave a nucleic acid and thereby inactivate a target nucleic acid molecule. These complementary regions allow sufficient hybridization of the enzymatic nucleic acid molecule to the target nucleic acid and thus permit cleavage. One hundred percent complementarity is preferred, but complementarity as low as 50-75% can also be useful in this invention (see for example Werner and Uhlenbeck, 1995, Nucleic Acids Research, 23, 2092-2096; Hammann et al., 1999, Antisense and Nucleic Acid Drug Dev., 9, 25-31). The nucleic acids can be modified at the base, sugar, and/or phosphate groups. The term enzymatic nucleic acid is used interchangeably with phrases such as ribozymes, catalytic RNA, enzymatic RNA, catalytic DNA, aptazyme or aptamer-binding ribozyme, regulatable ribozyme, catalytic oligonucleotides, nucleozyme, DNAzyme, RNA enzyme, endoribonuclease, endonuclease, minizyme, leadzyme, oligozyme or DNA enzyme. All of these terminologies describe nucleic acid molecules with enzymatic activity. The specific enzymatic nucleic acid molecules described in the instant application are not limiting in the invention and those skilled in the art will recognize that all that is important in an enzymatic nucleic acid molecule of this invention is that it has a specific substrate binding site which is complementary to one or more of the target nucleic acid regions, and that it have nucleotide sequences within or surrounding that substrate binding site which impart a nucleic acid cleaving and/or ligation activity to the molecule (Cech et al., U.S. Pat. No. 4,987,071; Cech et al., 1988, 260 JAMA 3030).

[0072] Several varieties of naturally-occurring enzymatic nucleic acids are known presently. Each can catalyze the hydrolysis of nucleic acid phosphodiester bonds in trans (and thus can cleave other nucleic acid molecules) under physiological conditions. Table I summarizes some of the characteristics of these ribozymes. In general, enzymatic nucleic acids act by first binding to a target nucleic acid. Such binding occurs through the target binding portion of a enzymatic nucleic acid which is held in close proximity to an enzymatic portion of the molecule that acts to cleave the target nucleic acid. Thus, the enzymatic nucleic acid first recognizes and then binds a target nucleic acid through complementary base-pairing, and once bound to the correct site, acts enzymatically to cut the target nucleic acid. Strategic cleavage of such a target nucleic acid will destroy its ability to direct synthesis of an encoded protein. After an enzymatic nucleic acid has bound and cleaved its nucleic acid target, it is released from that nucleic acid to search for another target and can repeatedly bind and cleave new targets. Thus, a single ribozyme molecule is able to cleave many molecules of target nucleic acid. In addition, the ribozyme is a highly specific inhibitor of gene expression, with the specificity of inhibition depending not only on the base-pairing mechanism of binding to the target nucleic acid, but also on the mechanism of target nucleic acid cleavage. Single mismatches, or base-substitutions, near the site of cleavage can completely eliminate catalytic activity of a ribozyme.

[0073] In one embodiment of the inventions described herein, an enzymatic nucleic acid molecule of the invention is formed in a hammerhead or hairpin motif, but can also be formed in the motif of a hepatitis delta virus, group I intron, group II intron or RNase P RNA (in association with an RNA guide sequence), Neurospora VS RNA, DNAzymes, NCH cleaving motifs, or G-cleavers. Examples of such hammerhead motifs are described by Dreyfus, supra, Rossi et al., 1992, AIDS Research and Human Retroviruses 8, 183; of hairpin motifs by Hampel et al., EP0360257, Hampel and Tritz, 1989 Biochemistry 28, 4929, Feldstein et al., 1989, Gene 82, 53, Haseloff and Gerlach, 1989, Gene, 82, 43, and Hampel et al., 1990 Nucleic Acids Res. 18, 299; Chowrira & McSwiggen, U.S. Pat. No. 5,631,359; an examples of a hepatitis delta virus motif is described by Perrotta and Been, 1992 Biochemistry 31, 16; examples of RNase P motifs are described by Guerrier-Takada et al., 1983 Cell 35, 849; Forster and Altman, 1990, Science 249, 783; Li and Altman, 1996, Nucleic Acids Res. 24, 835; examples of Neurospora VS RNA ribozyme motifs are described by Collins (Saville and Collins, 1990 Cell 61, 685-696; Saville and Collins, 1991 Proc. Natl. Acad. Sci. USA 88, 8826-8830; Collins and Olive, 1993 Biochemistry 32, 2795-2799; Guo and Collins, 1995, EMBO. J. 14, 363); examples of Group II introns are described by Griffin et al., 1995, Chem. Biol. 2, 761; Michels and Pyle, 1995, Biochemistry 34, 2965; Pyle et al., International PCT Publication No. WO 96/22689; an example of a Group I intron is described by Cech et al., U.S. Pat. No. 4,987,071; and examples of DNAzymes are described by Usman et al., International PCT Publication No. WO 95/11304; Chartrand et al., 1995, NAR 23, 4092; Breaker et al., 1995, Chem. Bio. 2, 655; Santoro et al., 1997, PNAS 94, 4262, and Beigelman et al., International PCT publication No. WO 99/55857. NCH cleaving motifs are described in Ludwig & Sproat, International PCT Publication No. WO 98/58058; and G-cleavers are described in Kore et al., 1998, Nucleic Acids Research 26, 4116-4120 and Eckstein et al., International PCT Publication No. WO 99/16871. Additional motifs such as the Aptazyme (Breaker et al., WO 98/43993), Amberzyme (Beigelman et al., U.S. Ser. No. 09/301,511) and Zinzyme (FIG. 7) (Beigelman et al., U.S. Ser. No. 09/918,728), all included by reference herein including drawings, can also be used in the present invention. These specific motifs or configurations are not limiting in the invention and those skilled in the art will recognize that all that is important in an enzymatic nucleic acid molecule of this invention is that it have a specific substrate binding site which is complementary to one or more of the target gene RNA regions, and that it have nucleotide sequences within or surrounding that substrate binding site which impart a RNA cleaving activity to the molecule (Cech et al., U.S. Pat. No. 4,987,071).

[0074] By “nucleic acid molecule” as used herein is meant a molecule having nucleotides. The nucleic acid can be single, double, or multiple stranded and can comprise modified or unmodified nucleotides or non-nucleotides or various mixtures and combinations thereof.

[0075] By “enzymatic portion” or “catalytic domain” is meant that portion/region of a enzymatic nucleic acid molecule essential for cleavage of a nucleic acid substrate (for example see FIG. 6).

[0076] By “substrate binding arm” or “substrate binding domain” is meant that portion/region of a enzymatic nucleic acid which is able to interact, for example via complementarity (i.e., able to base-pair with), with a portion of its substrate. Preferably, such complementarity is 100%, but can be less if desired. For example, as few as 10 bases out of 14 can be base-paired (see for example Werner and Uhlenbeck, 1995, Nucleic Acids Research, 23, 2092-2096; Hammann et al., 1999, Antisense and Nucleic Acid Drug Dev., 9, 25-31). Examples of such arms are shown generally in FIGS. 6-8. That is, these arms contain sequences within a enzymatic nucleic acid which are intended to bring enzymatic nucleic acid and target nucleic acid together through complementary base-pairing interactions. An enzymatic nucleic acid of the invention can have binding arms that are contiguous or non-contiguous and can be of varying lengths. The length of the binding arm(s) are preferably greater than or equal to four nucleotides and of sufficient length to stably interact with the target nucleic acid; preferably 12-100 nucleotides; more preferably 14-24 nucleotides long (see for example Werner and Uhlenbeck, supra; Hamman et al., supra; Hampel et al., EP0360257; Berzal-Herranz et al., 1993, EMBO J., 12, 2567-73) or between 8 and 14 nucleotides long. If two binding arms are chosen, the design is such that the length of the binding arms are symmetrical (i.e., each of the binding arms is of the same length; e.g., four and four, five and five nucleotides, or six and six nucleotides, or seven and seven nucleotides long) or asymmetrical (i.e., the binding arms are of different length; e.g., three and five, six and three nucleotides; three and six nucleotides long; four and five nucleotides long; four and six nucleotides long; four and seven nucleotides long; and the like).

[0077] By “Inozyme” or “NCH” motif or configuration is meant, an enzymatic nucleic acid molecule comprising a motif as is generally described as NCH Rz in FIG. 6 and in Ludwig et al., International PCT Publication No. WO 98/58058 and U.S. patent application Ser. No. 08/878,640. Inozymes possess endonuclease activity to cleave nucleic acid substrates having a cleavage triplet NCH/, where N is a nucleotide, C is cytidine and H is adenosine, uridine or cytidine, and “/” represents the cleavage site. H is used interchangeably with X. Inozymes can also possess endonuclease activity to cleave nucleic acid substrates having a cleavage triplet NCN/, where N is a nucleotide, C is cytidine, and “/” represents the cleavage site. “I” in FIG. 6 represents an Inosine nucleotide, preferably a ribo-Inosine or xylo-Inosine nucleoside.

[0078] By “G-cleaver” motif or configuration is meant, an enzymatic nucleic acid molecule comprising a motif as is generally described as G-cleaver Rz in FIG. 6 and in Eckstein et al., U.S. Pat. No. 6,127,173. G-cleavers possess endonuclease activity to cleave nucleic acid substrates having a cleavage triplet NYN/, where N is a nucleotide, Y is uridine or cytidine and “/” represents the cleavage site. G-cleavers can be chemically modified as is generally shown in FIG. 6.

[0079] By “amberzyme” motif or configuration is meant, an enzymatic nucleic acid molecule comprising a motif as is generally described in Beigelman et al., International PCT publication No. WO 99/55857 and U.S. patent application Ser. No. 09/476,387. Amberzymes possess endonuclease activity to cleave nucleic acid substrates having a cleavage triplet NG/N, where N is a nucleotide, G is guanosine, and “/” represents the cleavage site. Amberzymes can be chemically modified to increase nuclease stability through substitutions using modified nucleotides. In addition, differing nucleoside and/or non-nucleoside linkers can be used to substitute the 5′-gaaa-3′ loops shown in the figure. Amberzymes represent a non-limiting example of an enzymatic nucleic acid molecule that does not require a ribonucleotide (2′-OH) group within its own nucleic acid sequence for activity.

[0080] By “zinzyme” motif or configuration is meant, an enzymatic nucleic acid molecule comprising a motif as is generally described in FIG. 7 and in Beigelman et al., International PCT publication No. WO 99/55857 and U.S. patent application Ser. No. 09/918,728. Zinzymes possess endonuclease activity to cleave nucleic acid substrates having a cleavage triplet including but not limited to YG/Y, where Y is uridine or cytidine, and G is guanosine and “/” represents the cleavage site. Zinzymes can be chemically modified to increase nuclease stability through substitutions as are generally shown in FIG. 7, including substituting 2′-O-methyl guanosine nucleotides for guanosine nucleotides. In addition, differing nucleotide and/or non-nucleotide linkers can be used to substitute the 5′-gaaa-2′ loop shown in the figure. Zinzymes represent a non-limiting example of an enzymatic nucleic acid molecule that does not require a ribonucleotide (2′-OH) group within its own nucleic acid sequence for activity.

[0081] By ‘DNAzyme’ is meant, an enzymatic nucleic acid molecule that does not require the presence of a 2′-OH group within its own nucleic acid sequence for activity. In particular embodiments the enzymatic nucleic acid molecule can have an attached linker or linkers or other attached or associated groups, moieties, or chains containing one or more nucleotides with 2′-OH groups. DNAzymes can be synthesized chemically or expressed endogenously in vivo, by means of a single stranded DNA vector or equivalent thereof. An example of a DNAzyme is shown in FIG. 8 and is generally reviewed in Usman et al., U.S. Pat. No. 6,159,714; Chartrand et al., 1995, NAR 23, 4092; Breaker et al., 1995, Chem. Bio. 2, 655; Santoro et al., 1997, PNAS 94, 4262; Breaker, 1999, Nature Biotechnology, 17, 422-423; and Santoro et. al., 2000, J. Am. Chem. Soc., 122, 2433-39. The “10-23” DNAzyme motif is one particular type of DNAzyme that was evolved using in vitro selection, see Santoro et al., supra and as generally described in Joyce et al., U.S. Pat. No. 5,807,718. Additional DNAzyme motifs can be selected for using techniques similar to those described in these references, and hence, are within the scope of the present invention.

[0082] By “sufficient length” is meant a nucleic acid molecule of the invention is long enough to provide the intended function under the expected condition. For example, a nucleic acid molecule of the invention needs to be of “sufficient length” to provide stable interaction with a target nucleic acid molecule under the expected binding conditions and environment. In another non-limiting example, for the binding arms of an enzymatic nucleic acid, “sufficient length” means that the binding arm sequence is long enough to provide stable binding to a target site under the expected reaction conditions and environment. The binding arms are not so long as to prevent useful turnover of the nucleic acid molecule.

[0083] By “stably interact” is meant interaction of an oligonucleotides with target nucleic acid (e.g., by forming hydrogen bonds with complementary nucleotides in the target under physiological conditions) that is sufficient to the intended purpose (e.g., cleavage of target nucleic acid by an enzyme).

[0084] By “equivalent” RNA to VEGF, VEGFRL and/or VEGFR2 is meant to include nucleic acid molecules having homology (partial or complete) to a nucleic acid encoding VEGF, VEGFR1 and/or VEGFR2 proteins or encoding proteins with similar function as VEGF, VEGFR1 and/or VEGFR2 proteins in various organisms, including human, rodent, primate, rabbit, pig, protozoans, fungi, plants, and other microorganisms and parasites. The equivalent nucleic acid sequence also includes, in addition to the coding region, regions such as 5′-untranslated region, 3′-untranslated region, introns, intron-exon junction and the like.

[0085] By “homology” is meant the nucleotide sequence of two or more nucleic acid molecules is partially or completely identical.

[0086] By “antisense nucleic acid”, it is meant a non-enzymatic nucleic acid molecule that binds to target nucleic acid by means of RNA-RNA or RNA-DNA or RNA-PNA (protein nucleic acid; Egholm et al., 1993 Nature 365, 566) interactions and alters the activity of the target nucleic acid (for a review, see Stein and Cheng, 1993 Science 261, 1004 and Woolf et al., U.S. Pat. No. 5,849,902). Typically, antisense molecules are complementary to a target sequence along a single contiguous sequence of the antisense molecule. However, in certain embodiments, an antisense molecule can bind to substrate such that the substrate molecule forms a loop, and/or an antisense molecule can bind such that the antisense molecule forms a loop. Thus, an antisense molecule can be complementary to two (or even more) non-contiguous substrate sequences or two (or even more) non-contiguous sequence portions of an antisense molecule can be complementary to a target sequence or both. For a review of current antisense strategies, see Schmajuk et al., 1999, J. Biol. Chem., 274, 21783-21789, Delihas et al., 1997, Nature, 15, 751-753, Stein et al., 1997, Antisense N. A. Drug Dev., 7, 151, Crooke, 2000, Methods Enzymol., 313, 3-45; Crooke, 1998, Biotech. Genet. Eng. Rev., 15, 121-157, Crooke, 1997, Ad. Pharmacol., 40, 1-49. In addition, antisense DNA can be used to target nucleic acid by means of DNA-RNA interactions, thereby activating RNase H, which digests the target nucleic acid in the duplex. The antisense oligonucleotides can comprise one or more RNAse H activating region, which is capable of activating RNAse H cleavage of a target nucleic acid. Antisense DNA can be synthesized chemically or expressed via the use of a single stranded DNA expression vector or equivalent thereof.

[0087] By “RNase H activating region” is meant a region (generally greater than or equal to 4-25 nucleotides in length, preferably from 5-11 nucleotides in length) of a nucleic acid molecule capable of binding to a target nucleic acid to form a non-covalent complex that is recognized by cellular RNase H enzyme (see for example Arrow et al., U.S. Pat. No. 5,849,902; Arrow et al., U.S. Pat. No. 5,989,912). The RNase H enzyme binds to a nucleic acid molecule-target nucleic acid complex and cleaves the target nucleic acid sequence. The RNase H activating region comprises, for example, phosphodiester, phosphorothioate (preferably at least four of the nucleotides are phosphorothiote substitutions; more specifically, 4-11 of the nucleotides are phosphorothiote substitutions); phosphorodithioate, 5′-thiophosphate, or methylphosphonate backbone chemistry or a combination thereof. In addition to one or more backbone chemistries described above, the RNase H activating region can also comprise a variety of sugar chemistries. For example, the RNase H activating region can comprise deoxyribose, arabino, fluoroarabino or a combination thereof, nucleotide sugar chemistry. Those skilled in the art will recognize that the foregoing are non-limiting examples and that any combination of phosphate, sugar and base chemistry of a nucleic acid that supports the activity of RNase H enzyme is within the scope of the definition of the RNase H activating region and the instant invention.

[0088] By “2-5A antisense chimera” is meant an antisense oligonucleotide containing a 5′-phosphorylated 2′-5′-linked adenylate residue. These chimeras bind to target nucleic acid in a sequence-specific manner and activate a cellular 2-5A-dependent ribonuclease which, in turn, cleaves the target nucleic acid (Torrence et al., 1993 Proc. Natl. Acad. Sci. USA 90, 1300; Silverman et al., 2000, Methods Enzymol., 313, 522-533; Player and Torrence, 1998, Pharmacol. Ther., 78, 55-113).

[0089] By “triplex forming oligonucleotides” is meant an oligonucleotide that can bind to a double-stranded polynucleotide, such as DNA, in a sequence-specific manner to form a triple-strand helix. Formation of such triple helix structure has been shown to inhibit transcription of the targeted gene (Duval-Valentin et al., 1992 Proc. Natl. Acad. Sci. USA 89, 504; Fox, 2000, Curr. Med. Chem., 7, 17-37; Praseuth et. al., 2000, Biochim. Biophys. Acta, 1489, 181-206).

[0090] By “gene” it is meant a nucleic acid that encodes an RNA, for example, nucleic acid sequences including but not limited to structural genes encoding a polypeptide.

[0091] The term “complementarity” as used herein refers to the ability of a nucleic acid to form hydrogen bond(s) with another nucleic acid sequence by either traditional Watson-Crick or other non-traditional types. In reference to nucleic molecules of the present invention, the binding free energy for a nucleic acid molecule with its target or complementary sequence is sufficient to allow the relevant function of the nucleic acid to proceed, e.g., enzymatic nucleic acid cleavage, antisense or triple helix inhibition. Determination of binding free energies for nucleic acid molecules is well known in the art (see, e.g., Turner et al., 1987, CSH Symp. Quant. Biol. LII pp.123-133; Frier et al., 1986, Proc. Nat. Acad. Sci. USA 83:9373-9377; Turner et al., 1987, J. Am. Chem. Soc. 109:3783-3785). A percent complementarity indicates the percentage of contiguous residues in a nucleic acid molecule which can form hydrogen bonds (e.g., Watson-Crick base pairing) with a second nucleic acid sequence (e.g., 5, 6, 7, 8, 9, 10 out of 10 being 50%, 60%, 70%, 80%, 90%, and 100% complementary). “Perfectly complementary” means that all the contiguous residues of a nucleic acid sequence will hydrogen bond with the same number of contiguous residues in a second nucleic acid sequence.

[0092] By “RNA” is meant a molecule comprising at least one ribonucleotide residue. By “ribonucleotide” or “2′-OH” is meant a nucleotide with a hydroxyl group at the 2′ position of a β-D-ribo-furanose moiety.

[0093] By “nucleic acid decoy molecule”, or “decoy” as used herein is meant a nucleic acid molecule that mimics the natural binding domain for a ligand. The decoy therefore competes with the natural binding target for the binding of a specific ligand. For example, it has been shown that over-expression of HIV trans-activation response (TAR) RNA can act as a “decoy” and efficiently binds HIV tat protein, thereby preventing it from binding to TAR sequences encoded in the HIV RNA (Sullenger et al., 1990, Cell, 63, 601-608).

[0094] By “aptamer” or “nucleic acid aptamer” as used herein is meant a nucleic acid molecule that binds specifically to a target molecule wherein the nucleic acid molecule has sequence that is distinct from sequence recognized by the target molecule in its natural setting. Alternately, an aptamer can be a nucleic acid molecule that binds to a target molecule where the target molecule does not naturally bind to a nucleic acid. The target molecule can be any molecule of interest. For example, the aptamer can be used to bind to a ligand binding domain of a protein, thereby preventing interaction of the naturally occurring ligand with the protein. Similarly, the nucleic acid molecules of the instant invention can bind to VEGFR1 or VEGFR2 receptors to block activity of the receptor. This is a non-limiting example and those in the art will recognize that other embodiments can be readily generated using techniques generally known in the art, see for example Gold et al., U.S. Pat. Nos. 5,475,096 and 5,270,163; Gold et al., 1995, Annu. Rev. Biochem., 64, 763; Brody and Gold, 2000, J. Biotechnol., 74, 5; Sun, 2000, Curr. Opin. Mol. Ther., 2, 100; Kusser, 2000, J. Biotechnol., 74, 27; Hermann and Patel, 2000, Science, 287, 820; and Jayasena, 1999, Clinical Chemistry, 45, 1628.

[0095] The term “double stranded RNA” or “dsRNA” as used herein refers to a double stranded RNA molecule capable of RNA interference “RNAi”, including short interfering RNA “siRNA” see for example Bass, 2001, Nature, 411, 428-429; Elbashir et al., 2001, Nature, 411, 494-498; and Kreutzer et al., International PCT Publication No. WO 00/44895; Zernicka-Goetz et al., International PCT Publication No. WO 01/36646; Fire, International PCT Publication No. WO 99/32619; Plaetinck et al., International PCT Publication No. WO 00/01846; Mello and Fire, International PCT Publication No. WO 01/29058; Deschamps-Depaillette, International PCT Publication No. WO 99/07409; and Li et al., International PCT Publication No. WO 00/44914.

[0096] By “nucleic acid sensor molecule” or “allozyme” as used herein is meant a nucleic acid molecule comprising an enzymatic domain and a sensor domain, where the enzymatic nucleic acid domain's ability to catalyze a chemical reaction is dependent on the interaction with a target signaling molecule, such as a nucleic acid, polynucleotide, oligonucleotide, peptide, polypeptide, or protein, for example VEGF, VEGFR1 and/or VEGFR2. The introduction of chemical modifications, additional functional groups, and/or linkers, to the nucleic acid sensor molecule can provide enhanced catalytic activity of the nucleic acid sensor molecule, increased binding affinity of the sensor domain to a target nucleic acid, and/or improved nuclease/chemical stability of the nucleic acid sensor molecule, and are hence within the scope of the present invention (see for example Usman et al., U.S. patent application Ser. No. 09/877,526, George et al., U.S. Pat. Nos. 5,834,186 and 5,741,679, Shih et al., U.S. Pat. No. 5,589,332, Nathan et al., U.S. Pat. No. 5,871,914, Nathan and Ellington, International PCT publication No. WO 00/24931, Breaker et al., International PCT Publication Nos. WO 00/26226 and 98/27104, and Sullenger et al., U.S. patent application Ser. No. 09/205,520).

[0097] By “sensor component” or “sensor domain” of the nucleic acid sensor molecule as used herein is meant, a nucleic acid sequence (e.g., RNA or DNA or analogs thereof) which interacts with a target signaling molecule, for example a nucleic acid sequence in one or more regions of a target nucleic acid molecule or more than one target nucleic acid molecule, and which interaction causes the enzymatic nucleic acid component of the nucleic acid sensor molecule to either catalyze a reaction or stop catalyzing a reaction. In the presence of target signaling molecule of the invention, such as VEGF, VEGFR1 and/or VEGFR2, the ability of the sensor component, for example, to modulate the catalytic activity of the nucleic acid sensor molecule, is inhibited or diminished. The sensor component can comprise recognition properties relating to chemical or physical signals capable of modulating the nucleic acid sensor molecule via chemical or physical changes to the structure of the nucleic acid sensor molecule. The sensor component can be derived from a naturally occurring nucleic acid binding sequence; for example, RNAs that bind to other nucleic acid sequences in vivo. Alternately, the sensor component can be derived from a nucleic acid molecule (aptamer) which is evolved to bind to a nucleic acid sequence within a target nucleic acid molecule (see for example Gold et al., U.S. Pat. No. 5,475,096 and 5,270,163). The sensor component can be covalently linked to the nucleic acid sensor molecule, or can be non-covalently associated. A person skilled in the art will recognize that all that is required is that the sensor component is able to selectively inhibit the activity of the nucleic acid sensor molecule to catalyze a reaction.

[0098] By “target molecule” or “target signaling molecule” is meant a molecule capable of interacting with a nucleic acid sensor molecule, specifically a sensor domain of a nucleic acid sensor molecule, in a manner that causes the nucleic acid sensor molecule to be active or inactive. The interaction of the signaling agent with a nucleic acid sensor molecule can result in modification of the enzymatic nucleic acid component of the nucleic acid sensor molecule via chemical, physical, topological, or conformational changes to the structure of the molecule, such that the activity of the enzymatic nucleic acid component of the nucleic acid sensor molecule is modulated, for example is activated or deactivated. Signaling agents can comprise target signaling molecules such as macromolecules, ligands, small molecules, metals and ions, nucleic acid molecules including but not limited to RNA and DNA or analogs thereof, proteins, peptides, antibodies, polysaccharides, lipids, sugars, microbial or cellular metabolites, pharmaceuticals, and organic and inorganic molecules in a purified or unpurified form, for example VEGF, VEGFR1 and/or VEGFR2.

[0099] The term “triplex forming oligonucleotides” as used herein refers to an oligonucleotide that can bind to a double-stranded DNA in a sequence-specific manner to form a triple-strand helix. Formation of such a triple helix structure has been shown to inhibit transcription of a targeted gene (Duval-Valentin et al., 1992 Proc. Natl. Acad. Sci. USA 89, 504; Fox, 2000, Curr. Med. Chem., 7, 17-37; Praseuth et. al., 2000, Biochim. Biophys. Acta, 1489, 181-206).

[0100] The nucleic acid molecules that modulate the expression of VEGF and/or VEGFr, such as VEGFR1 and/or VEGFR2 specific nucleic acids, represent a novel therapeutic approach to treat or control a variety of angiogenesis related disorders and conditions, including but not limited to tumor angiogenesis, cancers such as breast cancer, lung cancer, colorectal cancer, renal cancer, pancreatic cancer, or melanoma, or ocular indications such as diabetic retinopathy, or age related macular degeneration, and/or endometriosis, endometrial carcinoma, gynecologic bleeding disorders, irregular menstrual cycles, ovulation, premenstrual syndrome (PMS), and/or menopausal dysfunction. The nucleic acid molecules that modulate the expression of VEGF and/or VEGFr, such as VEGFR1 and/or VEGFR2 specific nucleic acids also represent a novel approach to control ovulation or embryonic implantation and therefore provide a novel means of birth control.

[0101] In one embodiment of the present invention, a nucleic acid molecule of the instant invention can be between 12 and 100 nucleotides in length. An exemplary enzymatic nucleic acid molecule of the invention is shown as Formula I and/or Formula II. For example, enzymatic nucleic acid molecules of the invention are preferably between 15 and 50 nucleotides in length, more preferably between 25 and 40 nucleotides in length, e.g., 34, 36, or 38 nucleotides in length (for example see Jarvis et al., 1996, J. Biol. Chem., 271, 29107-29112). Exemplary DNAzymes of the invention are preferably between 15 and 40 nucleotides in length, more preferably between 25 and 35 nucleotides in length, e.g., 29, 30, 31, or 32 nucleotides in length (see for example Santoro et al., 1998, Biochemistry, 37, 13330-13342; Chartrand et al., 1995, Nucleic Acids Research, 23, 4092-4096). Exemplary antisense molecules of the invention are preferably between 15 and 75 nucleotides in length, more preferably between 20 and 35 nucleotides in length, e.g., 25, 26, 27, or 28 nucleotides in length (see for example Woolf et al., 1992, PNAS., 89, 7305-7309; Milner et al., 1997, Nature Biotechnology, 15, 537-541). Exemplary triplex forming oligonucleotide molecules of the invention are preferably between 10 and 40 nucleotides in length, more preferably between 12 and 25 nucleotides in length, e.g., 18, 19, 20, or 21 nucleotides in length (see for example Maher et al., 1990, Biochemistry, 29, 8820-8826; Strobel and Dervan, 1990, Science, 249, 73-75). Those skilled in the art will recognize that all that is required is that the nucleic acid molecule be of length and conformation sufficient and suitable for the nucleic acid molecule to catalyze a reaction contemplated herein. The length of the nucleic acid molecules of the instant invention are not limiting within the general limits stated.

[0102] In a preferred embodiment, a nucleic acid molecule that modulates, for example, down-regulates, VEGF and/or VEGFr, such as VEGFR1 and/or VEGFR2 replication or expression comprises between 8 and 100 bases complementary to a nucleic acid molecule of VEGFR1 and/or VEGFR2. More preferably, a nucleic acid molecule that modulates VEGF and/or VEGFr, such as VEGFR1 and/or VEGFR2 replication or expression comprises between 14 and 24 bases complementary to a nucleic acid molecule of VEGFR1 and/or VEGFR2.

[0103] The invention provides a method for producing a class of nucleic acid-based gene modulating agents which exhibit a high degree of specificity for the nucleic acid of a desired target. For example, a nucleic acid molecule of the invention is preferably targeted to a highly conserved sequence region of target nucleic acids encoding VEGF and/or VEGFr, such as VEGFR1 and/or VEGFR2 (specifically VEGF, VEGFR1 and/or VEGFR2 genes) such that specific treatment of a disease or condition can be provided with either one or several nucleic acid molecules of the invention. Such nucleic acid molecules can be delivered exogenously to specific tissue or cellular targets as required. Alternatively, the nucleic acid molecules can be expressed from DNA and/or RNA vectors that are delivered to specific cells.

[0104] As used in herein “cell” is used in its usual biological sense, and does not refer to an entire multicellular organism. The cell can, for example, be in vitro, e.g., in cell culture, or present in a multicellular organism, including, e.g., birds, plants and mammals such as humans, cows, sheep, apes, monkeys, swine, dogs, and cats. The cell may be prokaryotic (e.g., bacterial cell) or eukaryotic (e.g., mammalian or plant cell).

[0105] By “VEGFR1 and/or VEGFR2 proteins” is meant, protein receptor or a mutant protein derivative thereof, having vascular endothelial growth factor receptor activity, for example, having the ability to bind vascular endothelial growth factor and/or having tyrosine kinase activity.

[0106] By “highly conserved sequence region” is meant, a nucleotide sequence of one or more regions in a target gene does not vary significantly from one generation to the other or from one biological system to the other.

[0107] “Angiogenesis” refers to formation of new blood vessels which is an essential process in reproduction, development and wound repair. “Tumor angiogenesis” refers to the induction of the growth of blood vessels from surrounding tissue into a solid tumor. Tumor growth and tumor metastasis are dependent on angiogenesis (for a review see Folkman, 1985 supra; Folkman 1990 J. Natl. Cancer Inst., 82, 4; Folkman and Shing, 1992 J. Biol. Chem. 267, 10931).

[0108] Angiogenesis plays an important role in other diseases such as arthritis wherein new blood vessels have been shown to invade the joints and degrade cartilage (Folkman and Shing, supra).

[0109] “Retinopathy” refers to inflammation of the retina and/or degenerative condition of the retina which may lead to occlusion of the retina and eventual blindness. In “diabetic retinopathy” angiogenesis causes the capillaries in the retina to invade the vitreous resulting in bleeding and blindness which is also seen in neonatal retinopathy (for a review see Folkman, 1985 supra; Folkman 1990 supra; Folkman and Shing, 1992 supra).

[0110] Nucleic acid-based inhibitors of VEGF and/or VEGFr, such as VEGFR1 and/or VEGFR2, expression are useful for the prevention, treatment, and/or control of angiogenesis related disorders and conditions, including but not limited to, tumor angiogenesis, cancers such as breast cancer, lung cancer, colorectal cancer, renal cancer, pancreatic cancer, or melanoma, or ocular indications such as diabetic retinopathy, or age related macular degeneration, and/or endometriosis, endometrial carcinoma, gynecologic bleeding disorders, irregular menstrual cycles, ovulation, premenstrual syndrome (PMS), menopausal dysfunction, and other diseases or conditions that are related to or will respond to the levels of VEGF, VEGFR1 and/or VEGFR2 in a cell or tissue, alone or in combination with other therapies. The reduction of VEGF and/or VEGFr, such as VEGFR1 and/or VEGFR2 expression (specifically VEGF, VEGFR1 and/or VEGFR2 gene RNA levels) and thus reduction in the level of the respective protein relieves, to some degree, the symptoms of the disease or condition. Nucleic acid-based inhibitors of VEGF and/or VEGFr, such as VEGFR1 and/or VEGFR2 expression are also useful as birth control agents, for example by inhibition of ovulation or embryonic uterine implantation.

[0111] The nucleic acid molecules of the invention can be added directly, or can be complexed with cationic lipids, packaged within liposomes, or otherwise delivered to target cells or tissues. The nucleic acid complexes can be locally administered to relevant tissues ex vivo, or in vivo through injection or infusion pump, with or without their incorporation in biopolymers. In preferred embodiments, the nucleic acid inhibitors comprise sequences, which are complementary to polynucleotides, for example DNA and RNA, having VEGF and/or VEGFr, such as VEGFR1 and/or VEGFR2 sequence.

[0112] Triplex molecules of the invention can be provided targeted to DNA target regions, and containing the DNA equivalent of a target sequence or a sequence complementary to the specified target (substrate) sequence. Antisense molecules typically are complementary to a target sequence along a single contiguous sequence of the antisense molecule. However, in certain embodiments, an antisense molecule can bind to substrate such that the substrate molecule forms a loop, and/or an antisense molecule can bind such that the antisense molecule forms a loop. Thus, the antisense molecule can be complementary to two (or even more) non-contiguous substrate sequences or two (or even more) non-contiguous sequence portions of an antisense molecule can be complementary to a target sequence or both.

[0113] By “consists essentially of” is meant that the active nucleic acid molecule of the invention, for example, an enzymatic nucleic acid molecule, contains an enzymatic center or core equivalent to those in the examples, and binding arms able to bind nucleic acid such that cleavage at the target site occurs. Other sequences can be present which do not interfere with such cleavage. Thus, a core region can, for example, include one or more loop, stem-loop structure, or linker which does not prevent enzymatic activity. Thus, a particular region of a nucleic acid molecule of the invention can be such a loop, stem-loop, nucleotide linker, and/or non-nucleotide linker and can be represented generally as sequence “X”. Thus, a core region may, for example, include one or more loop or stem-loop structures which do not prevent enzymatic activity. For example, a core sequence for a hammerhead enzymatic nucleic acid can comprise a conserved sequence, such as 5′-CUGAUGAG-3′ and 5′-CGAA-3′ connected by “X”, where X is 5′-GCCGUUAGGC-3′ (SEQ ID NO 5979), or any other Stem II region known in the art, or a nucleotide and/or non-nucleotide linker. Similarly, for other nucleic acid molecules of the instant invention, such as Inozyme, G-cleaver, amberzyme, zinzyme, DNAzyme, antisense, 2-5A antisense, triplex forming nucleic acid, aptamers, decoy nucleic acids, dsRNA or siRNA, other sequences or non-nucleotide linkers can be present that do not interfere with the function of the nucleic acid molecule.

[0114] Sequence X can be a linker of >2 nucleotides in length, preferably 3, 4, 5, 6, 7, 8, 9, 10, 15, 20, 26, 30, where the nucleotides can preferably be internally base-paired to form a stem of preferably ≧2 base pairs. Alternatively or in addition, sequence X can be a non-nucleotide linker. In yet another embodiment, the nucleotide linker X can be a nucleic acid aptamer, such as an ATP aptamer, HIV Rev aptamer (RRE), HIV Tat aptamer (TAR) and others (for a review see Gold et al., 1995, Annu. Rev. Biochem., 64, 763; and Szostak & Ellington, 1993, in The RNA World, ed. Gesteland and Atkins, pp. 511, CSH Laboratory Press). A nucleic acid aptamer includes a nucleic acid sequence capable of interacting with a ligand. The ligand can be any natural or a synthetic molecule, including but not limited to a resin, metabolites, nucleosides, nucleotides, drugs, toxins, transition state analogs, peptides, lipids, proteins, amino acids, nucleic acid molecules, hormones, carbohydrates, receptors, cells, viruses, bacteria and others.

[0115] In yet another embodiment, the non-nucleotide linker X is as defined herein. The term “non-nucleotide” as used herein include either abasic nucleotide, polyether, polyamine, polyamide, peptide, carbohydrate, lipid, or polyhydrocarbon compounds. Specific examples include those described by Seela and Kaiser, Nucleic Acids Res. 1990, 18:6353 and Nucleic Acids Res. 1987, 15:3113; Cload and Schepartz, J. Am. Chem. Soc. 1991, 113:6324; Richardson and Schepartz, J. Am. Chem. Soc. 1991, 113:5109; Ma et al., Nucleic Acids Res. 1993, 21:2585 and Biochemistry 1993, 32:1751; Durand et al., Nucleic Acids Res. 1990, 18:6353; McCurdy et al., Nucleosides & Nucleotides 1991, 10:287; Jschke et al., Tetrahedron Lett. 1993, 34:301; Ono et al., Biochemistry 1991, 30:9914; Arnold et al., International Publication No. WO 89/02439; Usman et al., International Publication No. WO 95/06731; Dudycz et al., International Publication No. WO 95/11910 and Ferentz and Verdine, J. Am. Chem. Soc. 1991, 113:4000, all hereby incorporated by reference herein.

[0116] A “non-nucleotide” further means any group or compound which can be incorporated into a nucleic acid chain in the place of one or more nucleotide units, including either sugar and/or phosphate substitutions, and allows the remaining bases to exhibit their enzymatic activity. The group or compound can be abasic in that it does not contain a commonly recognized nucleotide base, such as adenosine, guanine, cytosine, uracil or thymine. Thus, in one embodiment, the invention features an enzymatic nucleic acid molecule having one or more non-nucleotide moieties, and having enzymatic activity to cleave an RNA or DNA molecule.

[0117] In another aspect of the invention, nucleic acid molecules that interact with target nucleic acid molecules and down-regulate VEGF and/or VEGFr, such as VEGFR1 and/or VEGFR2 (specifically VEGF, VEGFR1 and/or VEGFR2 gene) activity are expressed from transcription units inserted into DNA or RNA vectors. The recombinant vectors are preferably DNA plasmids or viral vectors. Enzymatic nucleic acid molecule or antisense expressing viral vectors can be constructed based on, but not limited to, adeno-associated virus, retrovirus, adenovirus, or alphavirus. The recombinant vectors capable of expressing the enzymatic nucleic acid molecules or antisense are delivered as described above, and persist in target cells. Alternatively, viral vectors can be used that provide for transient expression of enzymatic nucleic acid molecules or antisense. Such vectors can be repeatedly administered as necessary. Once expressed, the enzymatic nucleic acid molecules or antisense bind to the target nucleic acid and down-regulate its function or expression. Delivery of enzymatic nucleic acid molecule or antisense expressing vectors can be systemic, such as by intravenous or intramuscular administration, by administration to target cells ex-planted from the patient followed by reintroduction into the patient, or by any other means that would allow for introduction into the desired target cell. Antisense DNA can be expressed via the use of a single stranded DNA intracellular expression vector.

[0118] By “vectors” is meant any nucleic acid- and/or viral-based technique used to deliver a desired nucleic acid.

[0119] By “subject” or “patient” is meant an organism, which is a donor or recipient of explanted cells, or the cells themselves. “Subject” or “Patient” also refers to an organism to which the nucleic acid molecules of the invention can be administered. Preferably, a subject or patient is a mammal or mammalian cells. More preferably, a subject or patient is a human or human cells.

[0120] By “enhanced enzymatic activity” is meant to include activity measured in cells and/or in vivo where the activity is a reflection of both the catalytic activity and the stability of the nucleic acid molecules of the invention. In this invention, the product of these properties can be increased in vivo compared to an all RNA enzymatic nucleic acid or all DNA enzyme. In some cases, the activity or stability of the nucleic acid molecule can be decreased (i.e., less than ten-fold), but the overall activity of the nucleic acid molecule is enhanced, in vivo.

[0121] The nucleic acid molecules of the instant invention, individually, or in combination or in conjunction with other drugs, can be used to treat diseases or conditions discussed above. For example, to treat a disease or condition associated with the levels of VEGFR1 and/or VEGFR2, the patient can be treated, or other appropriate cells can be treated, as is evident to those skilled in the art, individually or in combination with one or more drugs under conditions suitable for the treatment.

[0122] In a further embodiment, the described molecules of the invention can be used in combination with other known treatments to treat conditions or diseases discussed above. For example, the described molecules can be used in combination with one or more known therapeutic agents to treat angiogenesis related disorders and conditions, including but not limited to tumor angiogenesis, cancers such as breast cancer, lung cancer, colorectal cancer, renal cancer, pancreatic cancer, or melanoma, or ocular indications such as diabetic retinopathy, or age related macular degeneration, and/or endometriosis, birth control, endometrial tumors, gynecologic bleeding disorders, irregular menstrual cycles, ovulation, premenstrual syndrome (PMS), menopausal dysfunction, endometrial carcinoma, and/or other diseases or conditions which respond to the modulation of VEGF and/or VEGFr, such as VEGFR1 and/or VEGFR2 expression.

[0123] Other features and advantages of the invention will be apparent from the following description of the preferred embodiments thereof, and from the claims.

### BRIEF DESCRIPTION OF THE DRAWINGS

[0124] FIG. 1 shows a secondary structure model of ANGIOZYME™ ribozyme bound to its RNA target.

[0125] FIG. 2 shows a time course of inhibition of primary tumor growth following systemic administration of ANGIOZYME™ in the LLC mouse model.

[0126] FIG. 3 shows inhibition of primary tumor growth following systemic administration of ANGIOZYME™ according to a certain dosing regimen in the LLC mouse model.

[0127] FIG. 4 shows a dose-dependent inhibition of tumor metastases following systemic administration of ANGIOZYME™ in a mouse colorectal model.

[0128] FIG. 5 is a graph showing the plasma concentration profile of ANGIOZYME™ after a single subcutaneous (SC) dose of 10, 30, 100 or 300 mg/m².

[0129] FIG. 6 shows examples of chemically stabilized ribozyme motifs. HH Rz, represents hammerhead ribozyme motif (Usman et al., 1996, Curr. Op. Struct. Bio., 1, 527); NCH Rz represents the NCH ribozyme motif (Ludwig et al., International PCT Publication No. WO 98/58058 and U.S. patent application Ser. No. 08/878,640); G-Cleaver, represents G-cleaver ribozyme motif (Kore et al., 1998, Nucleic Acids Research 26, 4116-4120, Eckstein et al., U.S. Pat. No. 6,127,173). N or n, represent independently a nucleotide which can be same or different and have complementarity to each other; rI, represents ribo-Inosine nucleotide; arrow indicates the site of cleavage within the target. Position 4 of the HH Rz and the NCH Rz is shown as having 2′-C-allyl modification, but those skilled in the art will recognize that this position can be modified with other modifications well known in the art, so long as such modifications do not significantly inhibit the activity of the ribozyme.

[0130] FIG. 7 shows an example of a Zinzyme A ribozyme motif that is chemically stabilized (see for example Beigelman et al., International PCT publication No. WO 99/55857 and U.S. patent application Ser. No. 09/918,728).

[0131] FIG. 8 shows an example of a DNAzyme motif described by Santoro et al., 1997, PNAS, 94, 4262 and Joyce et al., U.S. Pat. No. 5,807,718.

[0132] FIG. 9 shows data demonstrating the inhibition of soluble VEGFR1 in a clinical study using ANGIOZYME (SEQ ID NO: 5977).

[0133] FIG. 10 shows an generalized outline for the mouse model of proliferative retinopathy showing the points of ribozyme administration.

[0134] FIG. 11 shows a graph demonstrating the efficacy of a VEGF-receptor-targeted enzymatic nucleic acid molecule in a mouse model of proliferative retinopathy.

### DETAILED DESCRIPTION OF THE INVENTION

[0135] Nucleic Acid Molecules and Mechanism of Action

[0136] Enzymatic Nucleic Acid: Several varieties of naturally-occurring enzymatic nucleic acids are presently known. In addition, several in vitro selection (evolution) strategies (Orgel, 1979, Proc. R. Soc. London, B 205, 435) have been used to evolve new nucleic acid catalysts capable of catalyzing cleavage and ligation of phosphodiester linkages (Joyce, 1989, Gene, 82, 83-87; Beaudry et al., 1992, Science 257, 635-641; Joyce, 1992, Scientific American 267, 90-97; Breaker et al., 1994, TIBTECH 12, 268; Bartel et al., 1993, Science 261:1411-1418; Szostak, 1993, TIBS 17, 89-93; Kumar et al., 1995, FASEB J, 9, 1183; Breaker, 1996, Curr. Op. Biotech., 7, 442; Santoro et al., 1997, Proc. Natl. Acad. Sci., 94, 4262; Tang et al., 1997, RNA 3, 914; Nakamaye & Eckstein, 1994, supra; Long & Uhlenbeck, 1994, supra; Ishizaka et al., 1995, supra; Vaish et al., 1997, Biochemistry 36, 6495; all of these are incorporated by reference herein). Each can catalyze a series of reactions including the hydrolysis of phosphodiester bonds in trans (and thus can cleave other nucleic acid molecules) under physiological conditions.

[0137] The enzymatic nature of an enzymatic nucleic acid molecule has significant advantages, one advantage being that the concentration of enzymatic nucleic acid molecule necessary to affect a therapeutic treatment is lower. This advantage reflects the ability of the enzymatic nucleic acid molecule to act enzymatically. Thus, a single enzymatic nucleic acid molecule is able to cleave many molecules of target nucleic acid. In addition, the enzymatic nucleic acid molecule is a highly specific inhibitor, with the specificity of inhibition depending not only on the base-pairing mechanism of binding to the target nucleic acid, but also on the mechanism of target nucleic acid cleavage. Single mismatches, or base-substitutions, near the site of cleavage can be chosen to completely eliminate catalytic activity of a enzymatic nucleic acid molecule.

[0138] Nucleic acid molecules having an endonuclease enzymatic activity are able to repeatedly cleave other separate nucleic acid molecules in a nucleotide base sequence-specific manner. With the proper design, such enzymatic nucleic acid molecules can be targeted to RNA transcripts, and achieve efficient cleavage in vitro (Zaug et al., 324, Nature 429 1986; Uhlenbeck, 1987 Nature 328, 596; Kim et al., 84 Proc. Natl. Acad. Sci. USA 8788, 1987; Dreyfus, 1988, Einstein Quart. J. Bio. Med., 6, 92; Haseloff and Gerlach, 334 Nature 585, 1988; Cech, 260 JAMA 3030, 1988; and Jefferies et al., 17 Nucleic Acids Research 1371, 1989; Santoro et al., 1997 supra).

[0139] Because of their sequence specificity, trans-cleaving enzymatic nucleic acid molecules can be used as therapeutic agents for human disease (Usman & McSwiggen, 1995 Ann. Rep. Med. Chem. 30, 285-294; Christoffersen and Marr, 1995 J. Med. Chem. 38, 2023-2037). Enzymatic nucleic acid molecules can be designed to cleave specific nucleic acid targets within the background of cellular nucleic acid. Such a cleavage event renders the nucleic acid non-functional and abrogates protein expression from that nucleic acid. In this manner, synthesis of a protein associated with a disease state can be selectively inhibited (Warashina et al., 1999, Chemistry and Biology, 6, 237-250).

[0140] Enzymatic nucleic acid molecules of the invention that are allosterically regulated (“allozymes”) can be used to down-regulate VEGF and/or VEGFr, such as VEGFR1 and/or VEGFR2, expression. These allosteric enzymatic nucleic acids or allozymes (see for example Usman et al., U.S. patent application Ser. No. 09/877,526, George et al., U.S. Pat. Nos. 5,834,186 and 5,741,679, Shih et al., U.S. Pat. No. 5,589,332, Nathan et al., U.S. Pat. No. 5,871,914, Nathan and Ellington, International PCT publication No. WO 00/24931, Breaker et al., International PCT Publication Nos. WO 00/26226 and 98/27104, and Sullenger et al., U.S. patent application Ser. No. 09/205,520) are designed to respond to a signaling agent, for example, mutant VEGFRL and/or VEGFR2 protein, wild-type VEGFRL and/or VEGFR2 protein, mutant VEGFR1 and/or VEGFR2 RNA, wild-type VEGFRL and/or VEGFR2 RNA, other proteins and/or RNAs involved in VEGF signal transduction, compounds, metals, polymers, molecules and/or drugs that are targeted to VEGFR1 and/or VEGFR2 expression, which in turn modulates the activity of the enzymatic nucleic acid molecule. In response to interaction with a predetermined signaling agent, the activity of the allosteric enzymatic nucleic acid is activated or inhibited such that the expression of a particular target is selectively down-regulated. The target can comprise wild-type VEGFRL and/or VEGFR2, mutant VEGFR1 and/or VEGFR2, and/or a predetermined component of the VEGF signal transduction pathway. In a specific example, allosteric enzymatic nucleic acid molecules that are activated by interaction with a RNA encoding VEGF protein are used as therapeutic agents in vivo. The presence of RNA encoding the VEGF protein activates the allosteric enzymatic nucleic acid molecule that subsequently cleaves the RNA encoding a VEGFR1 and/or VEGFR2 protein resulting in the inhibition of VEGFR1 and/or VEGFR2 protein expression.

[0141] In another non-limiting example, an allozyme can be activated by a VEGF and/or VEGFr, such as VEGFR1 and/or VEGFR2 protein, peptide, or mutant polypeptide that causes the allozyme to inhibit the expression of VEGF and/or VEGFr, such as VEGFR1 and/or VEGFR2 genes, by, for example, cleaving RNA encoded by VEGF, VEGFR1 and/or VEGFR2 gene. In this non-limiting example, the allozyme acts as a decoy to inhibit the function of VEGF, VEGFR1 and/or VEGFR2 and also inhibit the expression of VEGF, VEGFR1 and/or VEGFR2 once activated by the VEGF, VEGFR1 and/or VEGFR2 protein.

[0142] Antisense: Antisense molecules can be modified or unmodified RNA, DNA, or mixed polymer oligonucleotides and primarily function by specifically binding to matching sequences resulting in inhibition of peptide synthesis (Wu-Pong, November 1994, BioPharm, 20-33). The antisense oligonucleotide binds to target RNA by Watson Crick base-pairing and blocks gene expression by preventing ribosomal translation of the bound sequences either by steric blocking or by activating RNase H enzyme. Antisense molecules can also alter protein synthesis by interfering with RNA processing or transport from the nucleus into the cytoplasm (Mukhopadhyay & Roth, 1996, Crit. Rev. in Oncogenesis 7, 151-190).

[0143] In addition, binding of single stranded DNA to RNA can result in nuclease degradation of the heteroduplex (Wu-Pong, supra; Crooke, supra). To date, the only backbone modified DNA chemistry which act as substrates for RNase H are phosphorothioates, phosphorodithioates, and borontrifluoridates. Recently it has been reported that 2′-arabino and 2′-fluoro arabino-containing oligos can also activate RNase H activity.

[0144] A number of antisense molecules have been described that utilize novel configurations of chemically modified nucleotides, secondary structure, and/or RNase H substrate domains (Woolf et al., International PCT Publication No. WO 98/13526; Thompson et al., International PCT Publication No. WO 99/54459; Hartmann et al., U.S. Ser. No. 60/101,174 which was filed on Sep. 21, 1998) all of these are incorporated by reference herein in their entirety.

[0145] In addition, antisense deoxyoligoribonucleotides can be used to target RNA by means of DNA-RNA interactions, thereby activating RNase H, which digests the target RNA in the duplex. Antisense DNA can be expressed via the use of a single stranded DNA intracellular expression vector or equivalents and variations thereof.

[0146] Triplex Forming Oligonucleotides (TFO): Single stranded DNA can be designed to bind to genomic DNA in a sequence specific manner. TFOs are comprised of pyrimidine-rich oligonucleotides which bind DNA helices through Hoogsteen Base-pairing (Wu-Pong, supra). The resulting triple helix composed of the DNA sense, DNA antisense, and TFO disrupts RNA synthesis by RNA polymerase. The TFO mechanism can result in gene expression or cell death since binding can be irreversible (Mukhopadhyay & Roth, supra).

[0147] 2-5A Antisense Chimera: The 2-5A system is an interferon mediated mechanism for RNA degradation found in higher vertebrates (Mitra et al., 1996, Proc Nat Acad Sci USA 93, 6780-6785). Two types of enzymes, 2-5A synthetase and RNase L, are required for RNA cleavage. The 2-5A synthetases require double stranded RNA to form 2′-5′ oligoadenylates (2-5A). 2-5A then acts as an allosteric effector for utilizing RNase L which has the ability to cleave single stranded RNA. The ability to form 2-5A structures with double stranded RNA makes this system particularly useful for inhibition of viral replication.

[0148] (2′-5′) oligoadenylate structures can be covalently linked to antisense molecules to form chimeric oligonucleotides capable of RNA cleavage (Torrence, supra). These molecules putatively bind and activate a 2-5A dependent RNase, the oligonucleotide/enzyme complex then binds to a target RNA molecule which can then be cleaved by the RNase enzyme.

[0149] RNAi: Double-stranded RNAs can suppress expression of homologous genes through an evolutionarily conserved process named RNA interference (RNAi) or post-transcriptional gene silencing (PTGS). One mechanism underlying silencing is the degradation of target mRNAs by an RNP complex, which contains short interfering RNAs (siRNAs) as guides to substrate selection. Short interfering RNAs are typically 21 to 23 nucleotides in length. A bidentate nuclease called Dicer has been implicated as the protein responsible for siRNA production. For example, a double-stranded RNA (dsRNA) matching a gene sequence is synthesized in vitro and introduced into a cell. The dsRNA feeds into a biological pathway and is broken into short pieces of short interfering (si) RNAs. With the help of cellular enzymes such as Dicer, the siRNA triggers the degradation of the messenger RNA that matches its sequence (see for example Tuschl et al., International PCT Publication No. WO 01/75164; Bass, 2001, Nature, 411, 428-429; Elbashir et al., 2001, Nature, 411, 494-498; and Kreutzer et al., International PCT Publication No. WO 00/44895).

[0150] Target Sites

[0151] Targets for useful nucleic acid molecules of the invention, such as enzymatic nucleic acid molecules, dsRNA, and antisense nucleic acids can be determined as disclosed in Draper et al., WO 93/23569; Sullivan et al., WO 93/23057; Thompson et al., WO 94/02595; Draper et al., WO 95/04818; McSwiggen et al., U.S. Pat. No. 5,525,468, and hereby incorporated by reference herein in totality. Other examples include the following PCT applications, which concern inactivation of expression of disease-related genes: WO 95/23225, WO 95/13380, WO 94/02595, incorporated by reference herein. Rather than repeat the guidance provided in those documents here, below are provided specific examples of such methods, not limiting to those in the art. Enzymatic nucleic acid molecules and antisense to such targets are designed as described in those applications and synthesized to be tested in vitro and in vivo, as also described. The sequences of human VEGF, VEGFR1 and/or VEGFR2 RNAs are screened for optimal nucleic acid target sites using a computer-folding algorithm. Potential nucleic acid binding/cleavage sites are identified. While human sequences can be screened and nucleic acid molecules thereafter designed, as discussed in Stinchcomb et al., WO 95/23225, mouse targeted enzymatic nucleic acid molecules can be useful to test efficacy of action of the nucleic acid molecule prior to testing in humans.

[0152] Nucleic acid molecule binding/cleavage sites are identified, for example enzymatic nucleic acid, antisense, and dsRNA mediated binding sites are chosen. For enzymatic nucleic acid molecules of the invention, the nucleic acid molecules are individually analyzed by computer folding (Jaeger et al., 1989 Proc. Natl. Acad. Sci. USA, 86, 7706) to assess whether the sequences fold into the appropriate secondary structure. Those nucleic acid molecules with unfavorable intramolecular interactions such as between the binding arms and the catalytic core can be eliminated from consideration. Varying binding arm lengths can be chosen to optimize activity.

[0153] Nucleic acids, such as antisense, RNAi, and/or enzymatic nucleic acid molecule binding/cleavage sites are identified and are designed to anneal to various sites in the nucleic acid target. The binding arms of enzymatic nucleic acid molecules of the invention are complementary to the target site sequences described above. Antisense and RNAi sequences are designed to have partial or complete complementarity to the nucleic acid target. The nucleic acid molecules can be chemically synthesized. The method of synthesis used follows the procedure for normal DNA/RNA synthesis as described below and in Usman et al., 1987 J. Am. Chem. Soc., 109, 7845; Scaringe et al., 1990 Nucleic Acids Res., 18, 5433; and Wincott et al., 1995 Nucleic Acids Res. 23, 2677-2684; Caruthers et al., 1992, Methods in Enzymology 211,3-19.

[0154] Synthesis of Nucleic Acid Molecules

[0155] Synthesis of nucleic acids greater than 100 nucleotides in length is difficult using automated methods, and the therapeutic cost of such molecules is prohibitive. In this invention, small nucleic acid motifs (“small refers to nucleic acid motifs less than about 100 nucleotides in length, preferably less than about 80 nucleotides in length, and more preferably less than about 50 nucleotides in length; e.g., antisense oligonucleotides, enzymatic nucleic acids, aptamers, allozymes, decoys, siRNA etc.) are preferably used for exogenous delivery. The simple structure of these molecules increases the ability of the nucleic acid to invade targeted regions of RNA structure. Exemplary molecules of the instant invention are chemically synthesized, and others can similarly be synthesized.

[0156] DNA Oligonucleotides are synthesized using protocols known in the art as described in Caruthers et al., 1992, Methods in Enzymology 211, 3-19, Thompson et al., International PCT Publication No. WO 99/54459, Wincott et al., 1995, Nucleic Acids Res. 23, 2677-2684, Wincott et al., 1997, Methods Mol. Bio., 74, 59, Brennan et al., 1998, Biotechnol Bioeng., 61, 33-45, and Brennan, U.S. Pat. No. 6,001,311. All of these references are incorporated herein by reference. The synthesis of oligonucleotides makes use of common nucleic acid protecting and coupling groups, such as dimethoxytrityl at the 5′-end, and phosphoramidites at the 3′-end. In a non-limiting example, small scale syntheses are conducted on a 394 Applied Biosystems, Inc. synthesizer using a 0.2 μmol scale protocol with a 2.5 min coupling step for 2′-O-methylated nucleotides and a 45 sec coupling step for 2′-deoxy nucleotides. Table II outlines the amounts and the contact times of the reagents used in the synthesis cycle. Alternatively, syntheses at the 0.2 μmol scale can be performed on a 96-well plate synthesizer, such as the instrument produced by Protogene (Palo Alto, Calif.) with minimal modification to the cycle. A 33-fold excess (60 μL of 0.11 M=6.6 μmol) of 2′-O-methyl phosphoramidite and a 105-fold excess of S-ethyl tetrazole (60 μL of 0.25 M=15 μmol) can be used in each coupling cycle of 2′-O-methyl residues relative to polymer-bound 5′-hydroxyl. A 22-fold excess (40 μL of 0.11 M=4.4 μmol) of deoxy phosphoramidite and a 70-fold excess of S-ethyl tetrazole (40 μL of 0.25 M=10 μmol) can be used in each coupling cycle of deoxy residues relative to polymer-bound 5′-hydroxyl. Average coupling yields on the 394 Applied Biosystems, Inc. synthesizer, determined by colorimetric quantitation of the trityl fractions, are typically 97.5-99%. Other oligonucleotide synthesis reagents for the 394 Applied Biosystems, Inc. synthesizer include; detritylation solution is 3% TCA in methylene chloride (ABI); capping is performed with 16% N-methyl imidazole in THF (ABD) and 10% acetic anhydride/10% 2,6-lutidine in THF (ABI); and oxidation solution is 16.9 mM I₂, 49 mM pyridine, 9% water in THF (PERSEPTIVE™). Burdick & Jackson Synthesis Grade acetonitrile is used directly from the reagent bottle. S-Ethyltetrazole solution (0.25 M in acetonitrile) is made up from the solid obtained from American International Chemical, Inc. Alternately, for the introduction of phosphorothioate linkages, Beaucage reagent (3H-1,2-Benzodithiol-3-one 1,1-dioxide, 0.05 M in acetonitrile) is used.

[0157] Deprotection of the DNA polynucleotides is performed as follows: the polymer-bound trityl-on oligoribonucleotide is transferred to a 4 mL glass screw top vial and suspended in a solution of 40% aq. methylamine (1 mL) at 65° C. for 10 min. After cooling to −20° C., the supernatant is removed from the polymer support. The support is washed three times with 1.0 mL of EtOH:MeCN:H2O/3:1:1, vortexed and the supernatant is then added to the first supernatant. The combined supernatants, containing the oligoribonucleotide, are dried to a white powder.

[0158] The method of synthesis used for RNA oligonucleotides including certain nucleic acid molecules of the invention follows the procedure as described in Usman et al., 1987, J. Am. Chem. Soc., 109, 7845; Scaringe et al., 1990, Nucleic Acids Res., 18, 5433; and Wincott et al., 1995, Nucleic Acids Res. 23, 2677-2684 Wincott et al., 1997, Methods Mol. Bio., 74, 59, and makes use of common nucleic acid protecting and coupling groups, such as dimethoxytrityl at the 5′-end, and phosphoramidites at the 3′-end. In a non-limiting example, small scale syntheses are conducted on a 394 Applied Biosystems, Inc. synthesizer using a 0.2 μmol scale protocol with a 7.5 min coupling step for alkylsilyl protected nucleotides and a 2.5 min coupling step for 2′-O-methylated nucleotides. Table II outlines the amounts and the contact times of the reagents used in the synthesis cycle. Alternatively, syntheses at the 0.2 μmol scale can be done on a 96-well plate synthesizer, such as the instrument produced by Protogene (Palo Alto, Calif.) with minimal modification to the cycle. A 33-fold excess (60 μL of 0.11 M=6.6 μmol) of 2′-O-methyl phosphoramidite and a 75-fold excess of S-ethyl tetrazole (60 μL of 0.25 M=15 μmol) can be used in each coupling cycle of 2′-O-methyl residues relative to polymer-bound 5′-hydroxyl. A 66-fold excess (120 μL of 0.11 M=13.2 μmol) of alkylsilyl (ribo) protected phosphoramidite and a 150-fold excess of S-ethyl tetrazole (120 μL of 0.25 M=30 μmol) can be used in each coupling cycle of ribo residues relative to polymer-bound 5′-hydroxyl. Average coupling yields on the 394 Applied Biosystems, Inc. synthesizer, determined by colorimetric quantitation of the trityl fractions, are typically 97.5-99%. Other oligonucleotide synthesis reagents for the 394 Applied Biosystems, Inc. synthesizer include; detritylation solution is 3% TCA in methylene chloride (ABI); capping is performed with 16% N-methyl imidazole in THF (ABI) and 10% acetic anhydride/10% 2,6-lutidine in THF (ABI); oxidation solution is 16.9 mM I₂, 49 mM pyridine, 9% water in THF (PERSEPTIVE™). Burdick & Jackson Synthesis Grade acetonitrile is used directly from the reagent bottle. S-Ethyltetrazole solution (0.25 M in acetonitrile) is made up from the solid obtained from American International Chemical, Inc. Alternately, for the introduction of phosphorothioate linkages, Beaucage reagent (3H-1,2-Benzodithiol-3-one 1,1-dioxide 0.05 M in acetonitrile) is used.

[0159] Deprotection of the RNA is performed using either a two-pot or one-pot protocol. For the two-pot protocol, the polymer-bound trityl-on oligoribonucleotide is transferred to a 4 mL glass screw top vial and suspended in a solution of 40% aq. methylamine (1 mL) at 65° C. for 10 min. After cooling to −20° C., the supernatant is removed from the polymer support. The support is washed three times with 1.0 mL of EtOH:MeCN:H2O/3:1:1, vortexed and the supernatant is then added to the first supernatant. The combined supernatants, containing the oligoribonucleotide, are dried to a white powder. The base deprotected oligoribonucleotide is resuspended in anhydrous TEA/HF/NMP solution (300 μL of a solution of 1.5 mL N-methylpyrrolidinone, 750 μL TEA and 1 mL TEA.3HF to provide a 1.4 M HF concentration) and heated to 65° C. After 1.5 h, the oligomer is quenched with 1.5 M NH₄HCO₃.

[0160] Alternatively, for the one-pot protocol, the polymer-bound trityl-on oligoribonucleotide is transferred to a 4 mL glass screw top vial and suspended in a solution of 33% ethanolic methylamine/DMSO: 1/1 (0.8 mL) at 65° C. for 15 min. The vial is brought to r.t. TEA.3HF (0.1 mL) is added and the vial is heated at 65° C. for 15 min. The sample is cooled at −20° C. and then quenched with 1.5 M NH₄HCO₃.

[0161] For purification of the trityl-on oligomers, the quenched NH₄HCO₃ solution is loaded onto a C-18 containing cartridge that had been prewashed with acetonitrile followed by 50 mM TEAA. After washing the loaded cartridge with water, the RNA is detritylated with 0.5% TFA for 13 min. The cartridge is then washed again with water, salt exchanged with 1 M NaCl and washed with water again. The oligonucleotide is then eluted with 30% acetonitrile.

[0162] Inactive hammerhead ribozymes or binding attenuated control (BAC) oligonucleotides) are synthesized by substituting a U for G₅ and a U for A₁₄ (numbering from Hertel, K. J., et al., 1992, Nucleic Acids Res., 20, 3252). Similarly, one or more nucleotide substitutions can be introduced in other enzymatic nucleic acid molecules to inactivate the molecule and such molecules can serve as a negative control.

[0163] The average stepwise coupling yields are typically >98% (Wincott et al., 1995 Nucleic Acids Res. 23, 2677-2684). Those of ordinary skill in the art will recognize that the scale of synthesis can be adapted to be larger or smaller than the example described above including but not limited to 96 well format, all that is important is the ratio of chemicals used in the reaction.

[0164] Alternatively, the nucleic acid molecules of the present invention can be synthesized separately and joined together post-synthetically, for example by ligation (Moore et al., 1992, Science 256, 9923; Draper et al., International PCT publication No. WO 93/23569; Shabarova et al., 1991, Nucleic Acids Research 19, 4247; Bellon et al., 1997, Nucleosides & Nucleotides, 16, 951; Bellon et al., 1997, Bioconjugate Chem. 8, 204).

[0165] Preferably, the nucleic acid molecules of the present invention are modified extensively to enhance stability by modification with nuclease resistant groups, for example, 2′-amino, 2′-C-allyl, 2′-flouro, 2′-O-methyl, 2′-H (for a review see Usman and Cedergren, 1992, TIBS 17, 34; Usman et al., 1994, Nucleic Acids Symp. Ser. 31, 163). Ribozymes are purified by gel electrophoresis using general methods or are purified by high pressure liquid chromatography (HPLC; See Wincott et al., Supra, the totality of which is hereby incorporated herein by reference) and are re-suspended in water.

[0166] Optimizing Activity of the Nucleic Acid Molecule of the Invention.

[0167] Chemically synthesizing nucleic acid molecules with modifications (base, sugar and/or phosphate) that prevent their degradation by serum ribonucleases can increase their potency (see e.g., Eckstein et al., International Publication No. WO 92/07065; Perrault et al., 1990 Nature 344, 565; Pieken et al., 1991, Science 253, 314; Usman and Cedergren, 1992, Trends in Biochem. Sci. 17, 334; Usman et al., International Publication No. WO 93/15187; and Rossi et al., International Publication No. WO 91/03162; Sproat, U.S. Pat. No. 5,334,711; Gold et al., U.S. Pat. No. 6,300,074; and Burgin et al., supra; all of which are incorporated by reference herein). Modifications which enhance their efficacy in cells, and removal of bases from nucleic acid molecules to shorten oligonucleotide synthesis times and reduce chemical requirements are desired. (All these publications are hereby incorporated by reference herein).

[0168] There are several examples in the art describing sugar, base and phosphate modifications that can be introduced into nucleic acid molecules with significant enhancement in their nuclease stability and efficacy. For example, oligonucleotides are modified to enhance stability and/or enhance biological activity by modification with nuclease resistant groups, for example, 2′-amino, 2′-C-allyl, 2′-flouro, 2′-O-methyl, 2′-H, nucleotide base modifications (for a review see Usman and Cedergren, 1992, TIBS. 17, 34; Usman et al., 1994, Nucleic Acids Symp. Ser. 31, 163; Burgin et al., 1996, Biochemistry, 35, 14090). Sugar modification of nucleic acid molecules have been extensively described in the art (see Eckstein et al., International Publication PCT No. WO 92/07065; Perrault et al. Nature, 1990, 344, 565-568; Pieken et al. Science, 1991, 253, 314-317; Usman and Cedergren, Trends in Biochem. Sci., 1992, 17, 334-339; Usman et al. International Publication PCT No. WO 93/15187; Sproat, U.S. Pat. No. 5,334,711 and Beigelman et al., 1995, J. Biol. Chem., 270, 25702; Beigelman et al., International PCT publication No. WO 97/26270; Beigelman et al., U.S. Pat. No. 5,716,824; Usman et al., U.S. Pat. No. 5,627,053; Woolf et al., International PCT Publication No. WO 98/13526; Thompson et al., U.S. Ser. No. 60/082,404 which was filed on Apr. 20, 1998; Karpeisky et al., 1998, Tetrahedron Lett., 39, 1131; Earnshaw and Gait, 1998, Biopolymers (Nucleic acid Sciences), 48, 39-55; Verma and Eckstein, 1998, Annu. Rev. Biochem., 67, 99-134; and Burlina et al., 1997, Bioorg. Med. Chem., 5, 1999-2010; all of the references are hereby incorporated in their totality by reference herein). Such publications describe general methods and strategies to determine the location of incorporation of sugar, base and/or phosphate modifications and the like into ribozymes without inhibiting catalysis, and are incorporated by reference herein. In view of such teachings, similar modifications can be used as described herein to modify the nucleic acid molecules of the instant invention.

[0169] While chemical modification of oligonucleotide internucleotide linkages with phosphorothioate, phosphorothioate, and/or 5′-methylphosphonate linkages improves stability, too many of these modifications can cause some toxicity. Therefore when designing nucleic acid molecules the amount of these internucleotide linkages should be minimized. The reduction in the concentration of these linkages should lower toxicity resulting in increased efficacy and higher specificity of these molecules.

[0170] Nucleic acid molecules having chemical modifications that maintain or enhance activity are provided. Such nucleic acid is also generally more resistant to nucleases than unmodified nucleic acid. Thus, in a cell and/or in vivo the activity may not be significantly lowered. Therapeutic nucleic acid molecules delivered exogenously are optimally stable within cells until translation of the target RNA has been inhibited long enough to reduce the levels of the undesirable protein. This period of time varies between hours to days depending upon the disease state. Clearly, nucleic acid molecules must be resistant to nucleases in order to function as effective intracellular therapeutic agents. Improvements in the chemical synthesis of RNA and DNA (Wincott et al., 1995 Nucleic Acids Res. 23, 2677; Caruthers et al., 1992, Methods in Enzymology 211,3-19 (incorporated by reference herein) have expanded the ability to modify nucleic acid molecules by introducing nucleotide modifications to enhance their nuclease stability as described above.

[0171] In one embodiment, nucleic acid molecules of the invention include one or more G-clamp nucleotides. A G-clamp nucleotide is a modified cytosine analog wherein the modifications confer the ability to hydrogen bond both Watson-Crick and Hoogsteen faces of a complementary guanine within a duplex, see for example Lin and Matteucci, 1998, J. Am. Chem. Soc., 120, 8531-8532. A single G-clamp analog substitution within an oligonucleotide can result in substantially enhanced helical thermal stability and mismatch discrimination when hybridized to complementary oligonucleotides. The inclusion of such nucleotides in nucleic acid molecules of the invention results in both enhanced affinity and specificity to nucleic acid targets. In another embodiment, nucleic acid molecules of the invention include one or more LNA “locked nucleic acid” nucleotides such as a 2′,4′-C mythylene bicyclo nucleotide (see for example Wengel et al., International PCT Publication No. WO 00/66604 and WO 99/14226).

[0172] In another embodiment, the invention features conjugates and/or complexes of nucleic acid molecules targeting VEGF receptors such as VEGFR1 and/or VEGFR2. Such conjugates and/or complexes can be used to facilitate delivery of molecules into a biological system, such as cells. The conjugates and complexes provided by the instant invention can impart therapeutic activity by transferring therapeutic compounds across cellular membranes, altering the pharmacokinetics, and/or modulating the localization of nucleic acid molecules of the invention. The present invention encompasses the design and synthesis of novel conjugates and complexes for the delivery of molecules, including but not limited to small molecules, lipids, phospholipids, nucleosides, nucleotides, nucleic acids, antibodies, toxins, negatively charged polymers and other polymers, for example proteins, peptides, hormones, carbohydrates, polyethylene glycols, or polyamines, across cellular membranes. In general, the transporters described are designed to be used either individually or as part of a multi-component system, with or without degradable linkers. These compounds are expected to improve delivery and/or localization of nucleic acid molecules of the invention into a number of cell types originating from different tissues, in the presence or absence of serum (see Sullenger and Cech, U.S. Pat. No. 5,854,038). Conjugates of the molecules described herein can be attached to biologically active molecules via linkers that are biodegradable, such as biodegradable nucleic acid linker molecules.

[0173] The term “biodegradable nucleic acid linker molecule” as used herein, refers to a nucleic acid molecule that is designed as a biodegradable linker to connect one molecule to another molecule, for example, a biologically active molecule. The stability of the biodegradable nucleic acid linker molecule can be modulated by using various combinations of ribonucleotides, deoxyribonucleotides, and chemically modified nucleotides, for example, 2′-O-methyl, 2′-fluoro, 2′-amino, 2′-O-amino, 2′-C-allyl, 2′-O-allyl, and other 2′-modified or base modified nucleotides. The biodegradable nucleic acid linker molecule can be a dimer, trimer, tetramer or longer nucleic acid molecule, for example, an oligonucleotide of about 2, 3, 4, 5, 6, 7, 8, 9, 10, 11, 12, 13, 14, 15, 16, 17, 18, 19, or 20 nucleotides in length, or can comprise a single nucleotide with a phosphorus based linkage, for example, a phosphoramidate or phosphodiester linkage. The biodegradable nucleic acid linker molecule can also comprise nucleic acid backbone, nucleic acid sugar, or nucleic acid base modifications.

[0174] The term “biodegradable” as used herein, refers to degradation in a biological system, for example enzymatic degradation or chemical degradation.

[0175] The term “biologically active molecule” as used herein, refers to compounds or molecules that are capable of eliciting or modifying a biological response in a system. Non-limiting examples of biologically active molecules contemplated by the instant invention include therapeutically active molecules such as antibodies, hormones, antivirals, peptides, proteins, chemotherapeutics, small molecules, vitamins, co-factors, nucleosides, nucleotides, oligonucleotides, enzymatic nucleic acids, antisense nucleic acids, triplex forming oligonucleotides, 2,5-A chimeras, siRNA, dsRNA, allozymes, aptamers, decoys and analogs thereof. Biologically active molecules of the invention also include molecules capable of modulating the pharmacokinetics and/or pharmacodynamics of other biologically active molecules, for example, lipids and polymers such as polyamines, polyamides, polyethylene glycol and other polyethers.

[0176] The term “phospholipid” as used herein, refers to a hydrophobic molecule comprising at least one phosphorus group. For example, a phospholipid can comprise a phosphorus containing group and saturated or unsaturated alkyl group, optionally substituted with OH, COOH, oxo, amine, or substituted or unsubstituted aryl groups.

[0177] Therapeutic nucleic acid molecules (e.g., enzymatic nucleic acid molecules and antisense nucleic acid molecules) delivered exogenously are optimally stable within cells until translation of the target RNA has been inhibited long enough to reduce the levels of the undesirable protein. This period of time varies between hours to days depending upon the disease state. These nucleic acid molecules should be resistant to nucleases in order to function as effective intracellular therapeutic agents. Improvements in the chemical synthesis of nucleic acid molecules described in the instant invention and in the art have expanded the ability to modify nucleic acid molecules by introducing nucleotide modifications to enhance their nuclease stability as described above.

[0178] In another embodiment, nucleic acid catalysts having chemical modifications that maintain or enhance enzymatic activity are provided. Such nucleic acids are also generally more resistant to nucleases than unmodified nucleic acid. Thus, in a cell and/or in vivo the activity of the nucleic acid may not be significantly lowered. As exemplified herein such enzymatic nucleic acids are useful in a cell and/or in vivo even if activity over all is reduced 10 fold (Burgin et al., 1996, Biochemistry, 35, 14090). Such enzymatic nucleic acids herein are said to “maintain” the enzymatic activity of an all RNA ribozyme or all DNA DNAzyme.

[0179] In another aspect the nucleic acid molecules comprise a 5′ and/or a 3′-cap structure.

[0180] By “cap structure” is meant chemical modifications, which have been incorporated at either terminus of the oligonucleotide (see for example Wincott et al., WO 97/26270, incorporated by reference herein). These terminal modifications protect the nucleic acid molecule from exonuclease degradation, and can help in delivery and/or localization within a cell. The cap can be present at the 5′-terminus (5′-cap) or at the 3′-terminus (3′-cap) or can be present on both terminus. In non-limiting examples, the 5′-cap includes inverted abasic residue (moiety), 4′,5′-methylene nucleotide; 1-(beta-D-erythrofuranosyl) nucleotide, 4′-thio nucleotide, carbocyclic nucleotide; 1,5-anhydrohexitol nucleotide; L-nucleotides; alpha-nucleotides; modified base nucleotide; phosphorodithioate linkage; threo-pentofuranosyl nucleotide; acyclic 3′,4′-seco nucleotide; acyclic 3,4-dihydroxybutyl nucleotide; acyclic 3,5-dihydroxypentyl nucleotide, 3′-3′-inverted nucleotide moiety; 3′-3′-inverted abasic moiety; 3′-2′-inverted nucleotide moiety; 3′-2′-inverted abasic moiety; 1,4-butanediol phosphate; 3′-phosphoramidate; hexylphosphate; aminohexyl phosphate; 3′-phosphate; 3′-phosphorothioate; phosphorodithioate; or bridging or non-bridging methylphosphonate moiety (for more details see Wincott et al., International PCT publication No. WO 97/26270, incorporated by reference herein).

[0181] In another embodiment the 3′-cap includes, for example 4′,5′-methylene nucleotide; 1-(beta-D-erythrofuranosyl) nucleotide; 4′-thio nucleotide, carbocyclic nucleotide; 5′-amino-alkyl phosphate; 1,3-diamino-2-propyl phosphate, 3-aminopropyl phosphate; 6-aminohexyl phosphate; 1,2-aminododecyl phosphate; hydroxypropyl phosphate; 1,5-anhydrohexitol nucleotide; L-nucleotide; alpha-nucleotide; modified base nucleotide; phosphorodithioate; threo-pentofuranosyl nucleotide; acyclic 3′,4′-seco nucleotide; 3,4-dihydroxybutyl nucleotide; 3,5-dihydroxypentyl nucleotide, 5′-5′-inverted nucleotide moiety; 5′-5′-inverted abasic moiety; 5′-phosphoramidate; 5′-phosphorothioate; 1,4-butanediol phosphate; 5′-amino; bridging and/or non-bridging 5′-phosphoramidate, phosphorothioate and/or phosphorodithioate, bridging or non bridging methylphosphonate and 5′-mercapto moieties (for more details see Beaucage and Iyer, 1993, Tetrahedron 49, 1925; incorporated by reference herein).

[0182] By the term “non-nucleotide” is meant any group or compound which can be incorporated into a nucleic acid chain in the place of one or more nucleotide units, including either sugar and/or phosphate substitutions, and allows the remaining bases to exhibit their enzymatic activity. The group or compound is abasic in that it does not contain a commonly recognized nucleotide base, such as adenosine, guanine, cytosine, uracil or thymine.

[0183] An “alkyl” group refers to a saturated aliphatic hydrocarbon, including straight-chain, branched-chain, and cyclic alkyl groups. Preferably, the alkyl group has 1 to 12 carbons. More preferably it is a lower alkyl of from 1 to 7 carbons, more preferably 1 to 4 carbons. The alkyl group can be substituted or unsubstituted. When substituted the substituted group(s) is preferably, hydroxyl, cyano, alkoxy, ═O, ═S, NO₂ or N(CH₃)₂, amino, or SH. The term also includes alkenyl groups which are unsaturated hydrocarbon groups containing at least one carbon-carbon double bond, including straight-chain, branched-chain, and cyclic groups. Preferably, the alkenyl group has 1 to 12 carbons. More preferably it is a lower alkenyl of from 1 to 7 carbons, more preferably 1 to 4 carbons. The alkenyl group can be substituted or unsubstituted. When substituted the substituted group(s) is preferably, hydroxyl, cyano, alkoxy, ═O, ═S, NO₂, halogen, N(CH₃)₂, amino, or SH. The term “alkyl” also includes alkynyl groups which have an unsaturated hydrocarbon group containing at least one carbon-carbon triple bond, including straight-chain, branched-chain, and cyclic groups. Preferably, the alkynyl group has 1 to 12 carbons. More preferably it is a lower alkynyl of from 1 to 7 carbons, more preferably 1 to 4 carbons. The alkynyl group can be substituted or unsubstituted. When substituted the substituted group(s) is preferably, hydroxyl, cyano, alkoxy, ═O, ═S, NO₂ or N(CH₃)₂, amino or SH.

[0184] Such alkyl groups can also include aryl, alkylaryl, carbocyclic aryl, heterocyclic aryl, amide and ester groups. An “aryl” group refers to an aromatic group which has at least one ring having a conjugated p electron system and includes carbocyclic aryl, heterocyclic aryl and biaryl groups, all of which can be optionally substituted. The preferred substituent(s) of aryl groups are halogen, trihalomethyl, hydroxyl, SH, OH, cyano, alkoxy, alkyl, alkenyl, alkynyl, and amino groups. An “alkylaryl” group refers to an alkyl group (as described above) covalently joined to an aryl group (as described above). Carbocyclic aryl groups are groups wherein the ring atoms on the aromatic ring are all carbon atoms. The carbon atoms are optionally substituted. Heterocyclic aryl groups are groups having from 1 to 3 heteroatoms as ring atoms in the aromatic ring and the remainder of the ring atoms are carbon atoms. Suitable heteroatoms include oxygen, sulfur, and nitrogen, and include furanyl, thienyl, pyridyl, pyrrolyl, N-lower alkyl pyrrolo, pyrimidyl, pyrazinyl, imidazolyl and the like, all optionally substituted. An “amide” refers to an —C(O)—NH—R, where R is either alkyl, aryl, alkylaryl or hydrogen. An “ester” refers to an —C(O)—OR′, where R is either alkyl, aryl, alkylaryl or hydrogen.

[0185] By “nucleotide” is meant a heterocyclic nitrogenous base in N-glycosidic linkage with a phosphorylated sugar. Nucleotides are recognized in the art to include natural bases (standard), and modified bases well known in the art. Such bases are generally located at the 1′ position of a nucleotide sugar moiety. Nucleotides generally comprise a base, sugar and a phosphate group. The nucleotides can be unmodified or modified at the sugar, phosphate and/or base moiety, (also referred to interchangeably as nucleotide analogs, modified nucleotides, non-natural nucleotides, non-standard nucleotides and other; see for example, Usman and McSwiggen, supra; Eckstein et al., International PCT Publication No. WO 92/07065; Usman et al., International PCT Publication No. WO 93/15187; Uhlman & Peyman, supra all are hereby incorporated by reference herein). There are several examples of modified nucleic acid bases known in the art as summarized by Limbach et al., 1994, Nucleic Acids Res. 22, 2183. Some of the non-limiting examples of chemically modified and other natural nucleic acid bases that can be introduced into nucleic acids include, for example, inosine, purine, pyridin-4-one, pyridin-2-one, phenyl, pseudouracil, 2,4,6-trimethoxy benzene, 3-methyl uracil, dihydrouridine, naphthyl, aminophenyl, 5-alkylcytidines (e.g., 5-methylcytidine), 5-alkyluridines (e.g., ribothymidine), 5-halouridine (e.g., 5-bromouridine) or 6-azapyrimidines or 6-alkylpyrimidines (e.g. 6-methyluridine), propyne, quesosine, 2-thiouridine, 4-thiouridine, wybutosine, wybutoxosine, 4-acetylcytidine, 5-(carboxyhydroxymethyl)uridine, 5′-carboxymethylaminomethyl-2-thiouridine, 5-carboxymethylaminomethyluridine, beta-D-galactosylqueosine, 1-methyladenosine, 1-methylinosine, 2,2-dimethylguanosine, 3-methylcytidine, 2-methyladenosine, 2-methylguanosine, N6-methyladenosine, 7-methylguanosine, 5-methoxyaminomethyl-2-thiouridine, 5-methylaminomethyluridine, 5-methylcarbonylmethyluridine, 5-methyloxyuridine, 5-methyl-2-thiouridine, 2-methylthio-N-6-isopentenyladenosine, beta-D-mannosylqueosine, uridine-5-oxyacetic acid, 2-thiocytidine, threonine derivatives and others (Burgin et al., 1996, Biochemistry, 35, 14090; Uhlman & Peyman, supra). By “modified bases” in this aspect is meant nucleotide bases other than adenine, guanine, cytosine and uracil at 1′ position or their equivalents; such bases can be used at any position, for example, within the catalytic core of an enzymatic nucleic acid molecule and/or in the substrate-binding regions of the nucleic acid molecule.

[0186] By “nucleoside” is meant a heterocyclic nitrogenous base in N-glycosidic linkage with a sugar. Nucleosides are recognized in the art to include natural bases (standard), and modified bases well known in the art. Such bases are generally located at the 1′ position of a nucleoside sugar moiety. Nucleosides generally comprise a base and sugar group. The nucleosides can be unmodified or modified at the sugar, and/or base moiety, (also referred to interchangeably as nucleoside analogs, modified nucleosides, non-natural nucleosides, non-standard nucleosides and other; see for example, Usman and McSwiggen, supra; Eckstein et al., International PCT Publication No. WO 92/07065; Usman et al., International PCT Publication No. WO 93/15187; Uhlman & Peyman, supra all are hereby incorporated by reference herein). There are several examples of modified nucleic acid bases known in the art as summarized by Limbach et al., 1994, Nucleic Acids Res. 22, 2183. Some of the non-limiting examples of chemically modified and other natural nucleic acid bases that can be introduced into nucleic acids include, inosine, purine, pyridin-4-one, pyridin-2-one, phenyl, pseudouracil, 2,4,6-trimethoxy benzene, 3-methyl uracil, dihydrouridine, naphthyl, aminophenyl, 5-alkylcytidines (e.g., 5-methylcytidine), 5-alkyluridines (e.g., ribothymidine), 5-halouridine (e.g., 5-bromouridine) or 6-azapyrimidines or 6-alkylpyrimidines (e.g. 6-methyluridine), propyne, quesosine, 2-thiouridine, 4-thiouridine, wybutosine, wybutoxosine, 4-acetylcytidine, 5-(carboxyhydroxymethyl)uridine, 5′-carboxymethylaminomethyl-2-thiouridine, 5-carboxymethylaminomethyluridine, beta-D-galactosylqueosine, 1-methyladenosine, 1-methylinosine, 2,2-dimethylguanosine, 3-methylcytidine, 2-methyladenosine, 2-methylguanosine, N6-methyladenosine, 7-methylguanosine, 5-methoxyaminomethyl-2-thiouridine, 5-methylaminomethyluridine, 5-methylcarbonylmethyluridine, 5-methyloxyuridine, 5-methyl-2-thiouridine, 2-methylthio-N-6-isopentenyladenosine, beta-D-mannosylqueosine, uridine-5-oxyacetic acid, 2-thiocytidine, threonine derivatives and others (Burgin et al., 1996, Biochemistry, 35, 14090; Uhlman & Peyman, supra). By “modified bases” in this aspect is meant nucleoside bases other than adenine, guanine, cytosine and uracil at 1′ position or their equivalents; such bases can be used at any position, for example, within the catalytic core of an enzymatic nucleic acid molecule and/or in the substrate-binding regions of the nucleic acid molecule.

[0187] In one embodiment, the invention features modified enzymatic nucleic acid molecules with phosphate backbone modifications comprising one or more phosphorothioate, phosphorodithioate, methylphosphonate, morpholino, amidate carbamate, carboxymethyl, acetamidate, polyamide, sulfonate, sulfonamide, sulfamate, formacetal, thioformacetal, and/or alkylsilyl, substitutions. For a review of oligonucleotide backbone modifications see Hunziker and Leumann, 1995, Nucleic Acid Analogues: Synthesis and Properties, in Modern Synthetic Methods, VCH, 331-417, and Mesmaeker et al., 1994, Novel Backbone Replacements for Oligonucleotides, in Carbohydrate Modifications in Antisense Research, ACS, 24-39. These references are hereby incorporated by reference herein.

[0188] By “abasic” is meant sugar moieties lacking a base or having other chemical groups in place of a base at the 1′ position, for example a 3′,3′-linked or 5′,5′-linked deoxyabasic ribose derivative (for more details see Wincott et al., International PCT publication No. WO 97/26270).

[0189] By “unmodified nucleoside” is meant one of the bases adenine, cytosine, guanine, thymine, uracil joined to the 1′ carbon of β-D-ribo-furanose.

[0190] By “modified nucleoside” is meant any nucleotide base which contains a modification in the chemical structure of an unmodified nucleotide base, sugar and/or phosphate.

[0191] In connection with 2′-modified nucleotides as described for the present invention, by “amino” is meant 2′-NH₂ or 2′-O—NH₂, which can be modified or unmodified. Such modified groups are described, for example, in Eckstein et al., U.S. Pat. No. 5,672,695 and Matulic-Adamic et al., WO 98/28317, respectively, which are both incorporated by reference in their entireties.

[0192] Various modifications to nucleic acid (e.g., antisense and ribozyme) structure can be made to enhance the utility of these molecules. For example, such modifications can enhance shelf-life, half-life in vitro, stability, and ease of introduction of such oligonucleotides to the target site, including, e.g., enhancing penetration of cellular membranes and conferring the ability to recognize and bind to targeted cells.

[0193] Use of the nucleic acid-based molecules of the invention can lead to better treatment of the disease progression by affording the possibility of combination therapies (e.g., multiple enzymatic nucleic acid molecules targeted to different genes, enzymatic nucleic acid molecules coupled with known small molecule inhibitors, or intermittent treatment with combinations of enzymatic nucleic acid molecules (including different enzymatic nucleic acid molecule motifs) and/or other chemical or biological molecules). The treatment of patients with nucleic acid molecules can also include combinations of different types of nucleic acid molecules. Therapies can be devised which include a mixture of enzymatic nucleic acid molecules (including different enzymatic nucleic acid molecule motifs), allozymes, antisense, dsRNA, aptamers, and/or 2-5A chimera molecules to one or more targets to alleviate symptoms of a disease.

[0194] Administration of Nucleic Acid Molecules

[0195] Methods for the delivery of nucleic acid molecules are described in Akhtar et al., 1992, Trends Cell Bio., 2, 139; and Delivery Strategies for Antisense Oligonucleotide Therapeutics, ed. Akhtar, 1995 which are both incorporated herein by reference. Sullivan et al., PCT WO 94/02595, further describes the general methods for delivery of enzymatic RNA molecules. These protocols can be utilized for the delivery of virtually any nucleic acid molecule. Nucleic acid molecules can be administered to cells by a variety of methods known to those familiar to the art, including, but not restricted to, encapsulation in liposomes, by iontophoresis, or by incorporation into other vehicles, such as hydrogels, cyclodextrins, biodegradable nanocapsules, and bioadhesive microspheres. Alternatively, the nucleic acid/vehicle combination is locally delivered by direct injection or by use of an infusion pump. Other routes of delivery include, but are not limited to oral (tablet or pill form) and/or intrathecal delivery (Gold, 1997, Neuroscience, 76, 1153-1158). Other approaches include the use of various transport and carrier systems, for example though the use of conjugates and biodegradable polymers. For a comprehensive review on drug delivery strategies including CNS delivery, see Ho et al., 1999, Curr. Opin. Mol. Ther., 1, 336-343 and Jain, Drug Delivery Systems: Technologies and Commercial Opportunities, Decision Resources, 1998 and Groothuis et al., 1997, J NeuroVirol., 3, 387-400. More detailed descriptions of nucleic acid delivery and administration are provided in Sullivan et al., supra, Draper et al., PCT WO93/23569, Beigelman et al., PCT WO99/05094, and Klimuk et al., PCT WO99/04819 all of which have been incorporated by reference herein.

[0196] The molecules of the instant invention can be used as pharmaceutical agents. Pharmaceutical agents prevent, inhibit the occurrence, or treat (alleviate a symptom to some extent, preferably all of the symptoms) of a disease state in a patient.

[0197] The polynucleotides of the invention can be administered (e.g., RNA, DNA or protein) and introduced into a patient by any standard means, with or without stabilizers, buffers, and the like, to form a pharmaceutical composition. When it is desired to use a liposome delivery mechanism, standard protocols for formation of liposomes can be followed. The compositions of the present invention can also be formulated and used as tablets, capsules or elixirs for oral administration; suppositories for rectal administration; sterile solutions; suspensions for injectable administration; and the other compositions known in the art.

[0198] The present invention also includes pharmaceutically acceptable formulations of the compounds described. These formulations include salts of the above compounds, e.g., acid addition salts, for example, salts of hydrochloric, hydrobromic, acetic acid, and benzene sulfonic acid.

[0199] A pharmacological composition or formulation refers to a composition or formulation in a form suitable for administration, e.g., systemic administration, into a cell or patient, preferably a human. Suitable forms, in part, depend upon the use or the route of entry, for example oral, transdermal, or by injection. Such forms should not prevent the composition or formulation from reaching a target cell (i.e., a cell to which the negatively charged polymer is desired to be delivered to). For example, pharmacological compositions injected into the blood stream should be soluble. Other factors are known in the art, and include considerations such as toxicity and forms which prevent the composition or formulation from exerting its effect.

[0200] By “systemic administration” is meant in vivo systemic absorption or accumulation of drugs in the blood stream followed by distribution throughout the entire body. Administration routes which lead to systemic absorption include, without limitations: intravenous, subcutaneous, intraperitoneal, inhalation, oral, intrapulmonary and intramuscular. Each of these administration routes expose the desired negatively charged polymers, e.g., nucleic acids, to an accessible diseased tissue. The rate of entry of a drug into the circulation has been shown to be a function of molecular weight or size. The use of a liposome or other drug carrier comprising the compounds of the instant invention can potentially localize the drug, for example, in certain tissue types, such as the tissues of the reticular endothelial system (RES). A liposome formulation which can facilitate the association of drug with the surface of cells, such as, lymphocytes and macrophages is also useful. This approach can provide enhanced delivery of the drug to target cells by taking advantage of the specificity of macrophage and lymphocyte immune recognition of abnormal cells, such as cells implicated in endometriosis, birth control, endometrial tumors, gynecologic bleeding disorders, irregular menstrual cycles, ovulation, premenstrual syndrome (PMS), menopausal dysfunction, and endometrial carcinoma.

[0201] By pharmaceutically acceptable formulation is meant, a composition or formulation that allows for the effective distribution of the nucleic acid molecules of the instant invention in the physical location most suitable for their desired activity. Non-limiting examples of agents suitable for formulation with the nucleic acid molecules of the instant invention include: PEG conjugated nucleic acids, phospholipid conjugated nucleic acids, nucleic acids containing lipophilic moieties, phosphorothioates, P-glycoprotein inhibitors (such as Pluronic P85) which can enhance entry of drugs into various tissues, for example the CNS (Jolliet-Riant and Tillement, 1999, Fundam. Clin. Pharmacol., 13, 16-26); biodegradable polymers, such as poly (DL-lactide-coglycolide) microspheres for sustained release delivery after implantation (Emerich, DF et al, 1999, Cell Transplant, 8, 47-58) Alkermes, Inc. Cambridge, Mass.; and loaded nanoparticles, such as those made of polybutylcyanoacrylate, which can deliver drugs across the blood brain barrier and can alter neuronal uptake mechanisms (Prog Neuropsychopharmacol Biol Psychiatry, 23, 941-949, 1999). Other non-limiting examples of delivery strategies, including CNS delivery of the nucleic acid molecules of the instant invention include material described in Boado et al., 1998, J. Pharm. Sci., 87, 1308-1315; Tyler et al., 1999, FEBS Lett., 421, 280-284; Pardridge et al., 1995, PNAS USA., 92, 5592-5596; Boado, 1995, Adv. Drug Delivery Rev., 15, 73-107; Aldrian-Herrada et al., 1998, Nucleic Acids Res., 26, 4910-4916; and Tyler et al., 1999, PNAS USA., 96, 7053-7058. All these references are hereby incorporated herein by reference.

[0202] The invention also features the use of the composition comprising surface-modified liposomes containing poly (ethylene glycol) lipids (PEG-modified, or long-circulating liposomes or stealth liposomes). Nucleic acid molecules of the invention can also comprise covalently attached PEG molecules of various molecular weights. These formulations offer a method for increasing the accumulation of drugs in target tissues. This class of drug carriers resists opsonization and elimination by the mononuclear phagocytic system (MPS or RES), thereby enabling longer blood circulation times and enhanced tissue exposure for the encapsulated drug (Lasic et al. Chem. Rev. 1995, 95, 2601-2627; Ishiwata et al., Chem. Pharm. Bull. 1995, 43, 1005-1011). Such liposomes have been shown to accumulate selectively in tumors, presumably by extravasation and capture in the neovascularized target tissues (Lasic et al., Science 1995, 267, 1275-1276; Oku et al., 1995, Biochim. Biophys. Acta, 1238, 86-90). The long-circulating liposomes enhance the pharmacokinetics and pharmacodynamics of DNA and RNA, particularly compared to conventional cationic liposomes which are known to accumulate in tissues of the MPS (Liu et al., J. Biol. Chem. 1995, 42, 24864-24870; Choi et al., International PCT Publication No. WO 96/10391; Ansell et al., International PCT Publication No. WO 96/10390; Holland et al., International PCT Publication No. WO 96/10392; all of which are incorporated by reference herein). Long-circulating liposomes are also likely to protect drugs from nuclease degradation to a greater extent compared to cationic liposomes, based on their ability to avoid accumulation in metabolically aggressive MPS tissues such as the liver and spleen. All of these references are incorporated by reference herein.

[0203] The present invention also includes compositions prepared for storage or administration which include a pharmaceutically effective amount of the desired compounds in a pharmaceutically acceptable carrier or diluent. Acceptable carriers or diluents for therapeutic use are well known in the pharmaceutical art, and are described, for example, in Remington's Pharmaceutical Sciences, Mack Publishing Co. (A. R. Gennaro edit. 1985) hereby incorporated by reference herein. For example, preservatives, stabilizers, dyes and flavoring agents can be provided. These include sodium benzoate, sorbic acid and esters of p-hydroxybenzoic acid. In addition, antioxidants and suspending agents can be used.

[0204] A pharmaceutically effective dose is that dose required to prevent, inhibit the occurrence, or treat (alleviate a symptom to some extent, preferably all of the symptoms) of a disease state. The pharmaceutically effective dose depends on the type of disease, the composition used, the route of administration, the type of mammal being treated, the physical characteristics of the specific mammal under consideration, concurrent medication, and other factors which those skilled in the medical arts will recognize. Generally, an amount between 0.1 mg/kg and 100 mg/kg body weight/day of active ingredients is administered dependent upon potency of the negatively charged polymer.

[0205] The nucleic acid molecules of the invention and formulations thereof can be administered orally, topically, parenterally, by inhalation or spray or rectally in dosage unit formulations containing conventional non-toxic pharmaceutically acceptable carriers, adjuvants and vehicles. The term parenteral as used herein includes percutaneous, subcutaneous, intravascular (e.g., intravenous), intramuscular, or intrathecal injection or infusion techniques and the like. In addition, there is provided a pharmaceutical formulation comprising a nucleic acid molecule of the invention and a pharmaceutically acceptable carrier. One or more nucleic acid molecules of the invention can be present in association with one or more non-toxic pharmaceutically acceptable carriers and/or diluents and/or adjuvants, and if desired other active ingredients. The pharmaceutical compositions containing nucleic acid molecules of the invention can be in a form suitable for oral use, for example, as tablets, troches, lozenges, aqueous or oily suspensions, dispersible powders or granules, emulsion, hard or soft capsules, or syrups or elixirs.

[0206] Compositions intended for oral use can be prepared according to any method known to the art for the manufacture of pharmaceutical compositions and such compositions can contain one or more such sweetening agents, flavoring agents, coloring agents or preservative agents in order to provide pharmaceutically elegant and palatable preparations. Tablets contain the active ingredient in admixture with non-toxic pharmaceutically acceptable excipients that are suitable for the manufacture of tablets. These excipients can be for example, inert diluents, such as calcium carbonate, sodium carbonate, lactose, calcium phosphate or sodium phosphate; granulating and disintegrating agents, for example, corn starch, or alginic acid; binding agents, for example starch, gelatin or acacia, and lubricating agents, for example magnesium stearate, stearic acid or talc. The tablets can be uncoated or they can be coated by known techniques. In some cases such coatings can be prepared by known techniques to delay disintegration and absorption in the gastrointestinal tract and thereby provide a sustained action over a longer period. For example, a time delay material such as glyceryl monosterate or glyceryl distearate can be employed.

[0207] Formulations for oral use can also be presented as hard gelatin capsules wherein the active ingredient is mixed with an inert solid diluent, for example, calcium carbonate, calcium phosphate or kaolin, or as soft gelatin capsules wherein the active ingredient is mixed with water or an oil medium, for example peanut oil, liquid paraffin or olive oil.

[0208] Aqueous suspensions contain the active materials in admixture with excipients suitable for the manufacture of aqueous suspensions. Such excipients are suspending agents, for example sodium carboxymethylcellulose, methylcellulose, hydropropyl-methylcellulose, sodium alginate, polyvinylpyrrolidone, gum tragacanth and gum acacia; dispersing or wetting agents can be a naturally-occurring phosphatide, for example, lecithin, or condensation products of an alkylene oxide with fatty acids, for example polyoxyethylene stearate, or condensation products of ethylene oxide with long chain aliphatic alcohols, for example heptadecaethyleneoxycetanol, or condensation products of ethylene oxide with partial esters derived from fatty acids and a hexitol such as polyoxyethylene sorbitol monooleate, or condensation products of ethylene oxide with partial esters derived from fatty acids and hexitol anhydrides, for example polyethylene sorbitan monooleate. The aqueous suspensions can also contain one or more preservatives, for example ethyl, or n-propyl p-hydroxybenzoate, one or more coloring agents, one or more flavoring agents, and one or more sweetening agents, such as sucrose or saccharin.

[0209] Oily suspensions can be formulated by suspending the active ingredients in a vegetable oil, for example arachis oil, olive oil, sesame oil or coconut oil, or in a mineral oil such as liquid paraffin. The oily suspensions can contain a thickening agent, for example beeswax, hard paraffin or cetyl alcohol. Sweetening agents and flavoring agents can be added to provide palatable oral preparations. These compositions can be preserved by the addition of an anti-oxidant such as ascorbic acid.

[0210] Dispersible powders and granules suitable for preparation of an aqueous suspension by the addition of water provide the active ingredient in admixture with a dispersing or wetting agent, suspending agent and one or more preservatives. Suitable dispersing or wetting agents or suspending agents are exemplified by those already mentioned above. Additional excipients, for example sweetening, flavoring and coloring agents, can also be present.

[0211] Pharmaceutical compositions of the invention can also be in the form of oil-in-water emulsions. The oily phase can be a vegetable oil or a mineral oil or mixtures of these. Suitable emulsifying agents can be naturally-occurring gums, for example gum acacia or gum tragacanth, naturally-occurring phosphatides, for example soy bean, lecithin, and esters or partial esters derived from fatty acids and hexitol, anhydrides, for example sorbitan monooleate, and condensation products of the said partial esters with ethylene oxide, for example polyoxyethylene sorbitan monooleate. The emulsions can also contain sweetening and flavoring agents.

[0212] Syrups and elixirs can be formulated with sweetening agents, for example glycerol, propylene glycol, sorbitol, glucose or sucrose. Such formulations can also contain a demulcent, a preservative and flavoring and coloring agents. The pharmaceutical compositions can be in the form of a sterile injectable aqueous or oleaginous suspension. This suspension can be formulated according to the known art using those suitable dispersing or wetting agents and suspending agents that have been mentioned above. The sterile injectable preparation can also be a sterile injectable solution or suspension in a non-toxic parentally acceptable diluent or solvent, for example as a solution in 1,3-butanediol. Among the acceptable vehicles and solvents that can be employed are water, Ringer's solution and isotonic sodium chloride solution. In addition, sterile, fixed oils are conventionally employed as a solvent or suspending medium. For this purpose any bland fixed oil can be employed including synthetic mono-or diglycerides. In addition, fatty acids such as oleic acid find use in the preparation of injectables.

[0213] The nucleic acid molecules of the invention can also be administered in the form of suppositories, e.g., for rectal administration of the drug. These compositions can be prepared by mixing the drug with a suitable non-irritating excipient that is solid at ordinary temperatures but liquid at the rectal temperature and will therefore melt in the rectum to release the drug. Such materials include cocoa butter and polyethylene glycols.

[0214] Nucleic acid molecules of the invention can be administered parenterally in a sterile medium. The drug, depending on the vehicle and concentration used, can either be suspended or dissolved in the vehicle. Advantageously, adjuvants such as local anesthetics, preservatives and buffering agents can be dissolved in the vehicle.

[0215] Dosage levels of the order of from about 0.1 mg to about 140 mg per kilogram of body weight per day are useful in the treatment of the above-indicated conditions (about 0.5 mg to about 7 g per patient per day). The amount of active ingredient that can be combined with the carrier materials to produce a single dosage form varies depending upon the host treated and the particular mode of administration. Dosage unit forms generally contain between from about 1 mg to about 500 mg of an active ingredient.

[0216] It is understood that the specific dose level for any particular patient depends upon a variety of factors including the activity of the specific compound employed, the age, body weight, general health, sex, diet, time of administration, route of administration, and rate of excretion, drug combination and the severity of the particular disease undergoing therapy.

[0217] For administration to non-human animals, the composition can also be added to the animal feed or drinking water. It can be convenient to formulate the animal feed and drinking water compositions so that the animal takes in a therapeutically appropriate quantity of the composition along with its diet. It can also be convenient to present the composition as a premix for addition to the feed or drinking water.

[0218] The nucleic acid molecules of the present invention can also be administered to a patient in combination with other therapeutic compounds to increase the overall therapeutic effect. The use of multiple compounds to treat an indication can increase the beneficial effects while reducing the presence of side effects.

[0219] Alternatively, certain of the nucleic acid molecules of the instant invention can be expressed within cells from eukaryotic promoters (e.g., Izant and Weintraub, 1985, Science, 229, 345; McGarry and Lindquist, 1986, Proc. Natl. Acad. Sci., USA 83, 399; Scanlon et al., 1991, Proc. Natl. Acad. Sci. USA, 88, 10591-5; Kashani-Sabet et al., 1992, Antisense Res. Dev., 2, 3-15; Dropulic et al., 1992, J. Virol., 66, 1432-41; Weerasinghe et al., 1991, J. Virol., 65, 5531-4; Ojwang et al., 1992, Proc. Natl. Acad. Sci. USA, 89, 10802-6; Chen et al., 1992, Nucleic Acids Res., 20, 4581-9; Sarver et al., 1990 Science, 247, 1222-1225; Thompson et al., 1995, Nucleic Acids Res., 23, 2259; Good et al., 1997, Gene Therapy, 4, 45; all of these references are hereby incorporated in their totalities by reference herein). Those skilled in the art realize that any nucleic acid can be expressed in eukaryotic cells from the appropriate DNA/RNA vector. The activity of such nucleic acids can be augmented by their release from the primary transcript by a enzymatic nucleic acid (Draper et al., PCT WO 93/23569, and Sullivan et al., PCT WO 94/02595; Ohkawa et al., 1992, Nucleic Acids Symp. Ser., 27, 15-6; Taira et al., 1991, Nucleic Acids Res., 19, 5125-30; Ventura et al., 1993, Nucleic Acids Res., 21, 3249-55; Chowrira et al., 1994, J. Biol. Chem., 269, 25856; all of these references are hereby incorporated in their totalities by reference herein). Gene therapy approaches specific to the CNS are described by Blesch et al., 2000, Drug News Perspect., 13, 269-280; Peterson et al., 2000, Cent. Nerv. Syst. Dis., 485-508; Peel and Klein, 2000, J. Neurosci. Methods, 98, 95-104; Hagihara et al., 2000, Gene Ther., 7, 759-763; and Herrlinger et al., 2000, Methods Mol. Med., 35, 287-312. AAV-mediated delivery of nucleic acid to cells of the nervous system is further described by Kaplitt et al., U.S. Pat. No. 6,180,613.

[0220] In another aspect of the invention, RNA molecules of the present invention are preferably expressed from transcription units (see for example Couture et al., 1996, TIG., 12, 510) inserted into DNA or RNA vectors. The recombinant vectors are preferably DNA plasmids or viral vectors. Ribozyme expressing viral vectors can be constructed based on, but not limited to, adeno-associated virus, retrovirus, adenovirus, or alphavirus. Preferably, the recombinant vectors capable of expressing the nucleic acid molecules are delivered as described above, and persist in target cells. Alternatively, viral vectors can be used that provide for transient expression of nucleic acid molecules. Such vectors can be repeatedly administered as necessary. Once expressed, the nucleic acid molecule binds to the target mRNA. Delivery of nucleic acid molecule expressing vectors can be systemic, such as by intravenous or intramuscular administration, by administration to target cells ex-planted from the patient followed by reintroduction into the patient, or by any other means that would allow for introduction into the desired target cell (for a review see Couture et al., 1996, TIG., 12, 510).

[0221] In one aspect the invention features an expression vector comprising a nucleic acid sequence encoding at least one of the nucleic acid molecules of the instant invention. The nucleic acid sequence encoding the nucleic acid molecule of the instant invention is operably linked in a manner which allows expression of that nucleic acid molecule.

[0222] In another aspect the invention features an expression vector comprising: a) a transcription initiation region (e.g., eukaryotic pol I, II or III initiation region); b) a transcription termination region (e.g., eukaryotic pol I, II or III termination region); c) a nucleic acid sequence encoding at least one of the nucleic acid catalyst of the instant invention; and wherein said sequence is operably linked to said initiation region and said termination region, in a manner which allows expression and/or delivery of said nucleic acid molecule. The vector can optionally include an open reading frame (ORF) for a protein operably linked on the 5′ side or the 3′-side of the sequence encoding the nucleic acid catalyst of the invention; and/or an intron (intervening sequences).

[0223] Transcription of the nucleic acid molecule sequences are driven from a promoter for eukaryotic RNA polymerase I (pol I), RNA polymerase II (pol II), or RNA polymerase III (pol III). Transcripts from pol II or pol III promoters are expressed at high levels in all cells; the levels of a given pol II promoter in a given cell type depends on the nature of the gene regulatory sequences (enhancers, silencers, etc.) present nearby. Prokaryotic RNA polymerase promoters are also used, providing that the prokaryotic RNA polymerase enzyme is expressed in the appropriate cells (Elroy-Stein and Moss, 1990, Proc. Natl. Acad. Sci. USA, 87, 6743-7; Gao and Huang 1993, Nucleic Acids Res., 21, 2867-72; Lieber et al., 1993, Methods Enzymol., 217, 47-66; Zhou et al., 1990, Mol. Cell. Biol., 10, 4529-37). All of these references are incorporated by reference herein. Several investigators have demonstrated that nucleic acid molecules, such as ribozymes expressed from such promoters can function in mammalian cells (e.g. Kashani-Sabet et al., 1992, Antisense Res. Dev., 2, 3-15; Ojwang et al., 1992, Proc. Natl. Acad. Sci. USA, 89, 10802-6; Chen et al., 1992, Nucleic Acids Res., 20, 4581-9; Yu et al., 1993, Proc. Natl. Acad. Sci. USA, 90, 6340-4; L'Huillier et al., 1992, EMBO J., 11, 4411-8; Lisziewicz et al., 1993, Proc. Natl. Acad. Sci. U.S.A, 90, 8000-4; Thompson et al., 1995, Nucleic Acids Res., 23, 2259; Sullenger & Cech, 1993, Science, 262, 1566). More specifically, transcription units such as the ones derived from genes encoding U6 small nuclear (snRNA), transfer RNA (tRNA) and adenovirus VA RNA are useful in generating high concentrations of desired RNA molecules such as ribozymes in cells (Thompson et al., supra; Couture and Stinchcomb, 1996, supra; Noonberg et al., 1994, Nucleic Acid Res., 22, 2830; Noonberg et al., U.S. Pat. No. 5,624,803; Good et al., 1997, Gene Ther., 4, 45; Beigelman et al., International PCT Publication No. WO 96/18736; all of these publications are incorporated by reference herein. The above ribozyme transcription units can be incorporated into a variety of vectors for introduction into mammalian cells, including but not restricted to, plasmid DNA vectors, viral DNA vectors (such as adenovirus or adeno-associated virus vectors), or viral RNA vectors (such as retroviral or alphavirus vectors) (for a review see Couture and Stinchcomb, 1996, supra).

[0224] In another aspect the invention features an expression vector comprising nucleic acid sequence encoding at least one of the nucleic acid molecules of the invention, in a manner which allows expression of that nucleic acid molecule. The expression vector comprises in one embodiment; a) a transcription initiation region; b) a transcription termination region; c) a nucleic acid sequence encoding at least one said nucleic acid molecule; and wherein said sequence is operably linked to said initiation region and said termination region, in a manner which allows expression and/or delivery of said nucleic acid molecule.

[0225] In another embodiment the expression vector comprises: a) a transcription initiation region; b) a transcription termination region; c) an open reading frame; d) a nucleic acid sequence encoding at least one said nucleic acid molecule, wherein said sequence is operably linked to the 3′-end of said open reading frame; and wherein said sequence is operably linked to said initiation region, said open reading frame and said termination region, in a manner which allows expression and/or delivery of said nucleic acid molecule. In yet another embodiment the expression vector comprises: a) a transcription initiation region; b) a transcription termination region; c) an intron; d) a nucleic acid sequence encoding at least one said nucleic acid molecule; and wherein said sequence is operably linked to said initiation region, said intron and said termination region, in a manner which allows expression and/or delivery of said nucleic acid molecule.

[0226] In another embodiment, the expression vector comprises: a) a transcription initiation region; b) a transcription termination region; c) an intron; d) an open reading frame; e) a nucleic acid sequence encoding at least one said nucleic acid molecule, wherein said sequence is operably linked to the 3′-end of said open reading frame; and wherein said sequence is operably linked to said initiation region, said intron, said open reading frame and said termination region, in a manner which allows expression and/or delivery of said nucleic acid molecule.

[0227] Flt-1 (VEGFR1), KDR (VEGFR2) and/or flk-1 are attractive nucleic acid-based therapeutic targets by several criteria. The interaction between VEGF and VEGF-R is well-established. Efficacy can be tested in well-defined and predictive animal models. Finally, the disease conditions are serious and current therapies are inadequate. Whereas protein-based therapies are designed to affect VEGF activity, nucleic acid-based therapy based on the molecules and methods described herein provides a direct and elegant approach to directly modulate fit-1, KDR and/or flk-1 expression.

[0228] Because VEGFR1 and VEGFR2 mRNAs are highly homologous in certain regions, some nucleic acid target sites are also homologous. In this case, a single nucleic acid molecule of the invention can target both VEGFR1 and VEGFR2 mRNAs. At partially homologous sites, a single nucleic acid molecule can sometimes be designed to accommodate a site on both mRNAs by including G/U base pairing. For example, if there is a G present in a enzymatic nucleic acid target site in VEGFR1 mRNA at the same position there is an A in the VEGFR2 enzymatic nucleic acid target site, the enzymatic nucleic acid can be synthesized with a U at the complementary position and it will bind both to sites. The advantage of one enzymatic nucleic acid that targets both VEGFR1 and VEGFR2 mRNAs is clear, especially in cases where both VEGF receptors may contribute to the progression of angiogenesis in the disease state.

### EXAMPLES

[0229] The following are non-limiting examples showing the selection, isolation, synthesis and activity of exemplary nucleic acids of the instant invention.

[0230] The following examples demonstrate the selection and design of antisense, aptamer, dsRNA, allozyme, hammerhead, DNAzyme, NCH, Amberzyme, Zinzyme, or G-Cleaver ribozyme molecules and binding/cleavage sites within VEGF, VEGFR1 and/or VEGFR2 RNA.

### Example 1

### Enzymatic Nucleic Acid-Mediated Inhibition of Angiogenesis In Vivo

[0231] The study described below was performed to assess the anti-angiogenic activity of hammerhead ribozymes targeted against flt-1 4229 site (SED ID NO: 5977) in the rat cornea model of VEGF induced angiogenesis (see above). These ribozymes have either active or inactive catalytic core and either bind and cleave or just bind to VEGF-R mRNA of the flt-1 subtype. The active ribozymes, that are able to bind and cleave the target RNA, have been shown to inhibit (¹²⁵I-labeled) VEGF binding in cultured endothelial cells and produce a dose-dependent decrease in VEGF induced endothelial cell proliferation in these cells. The catalytically inactive forms of these ribozymes, which can only bind to the RNA but cannot catalyze RNA cleavage, failed to inhibit VEGF binding and failed to decrease VEGF induced endothelial cell proliferation. The ribozymes and VEGF were co-delivered using the filter disk method: Nitrocellulose filter disks (Millipore®) of 0.057 diameter were immersed in appropriate solutions and were surgically implanted in rat cornea as described by Pandey et al., supra. This delivery method has been shown to deliver rhodamine-labeled free ribozyme to scleral cells and, in all likelihood cells of the pericorneal vascular plexus. Since the active ribozymes show cell culture efficacy and can be delivered to the target site using the disk method, it is essential that these ribozymes be assessed for in vivo anti-angiogenic activity.

[0232] The stimulus for angiogenesis in this study was the treatment of the filter disk with 30 μM VEGF which is implanted within the cornea's stroma. This dose yields reproducible neovascularization stemming from the pericorneal vascular plexus growing toward the disk in a dose-response study 5 days following implant. Filter disks treated only with the vehicle for VEGF show no angiogenic response. The ribozymes were co-adminstered with VEGF on a disk in two different ribozyme concentrations. One concern with the simultaneous administration is that the ribozymes will not be able to inhibit angiogenesis since VEGF receptors can be stimulated. However, we have observed that in low VEGF doses, the neovascular response reverts to normal suggesting that the VEGF stimulus is essential for maintaining the angiogenic response. Blocking the production of VEGF receptors using simultaneous administration of anti-VEGF-R mRNA ribozymes could attenuate the normal neovascularization induced by the filter disk treated with VEGF.

[0233] Materials and Methods:

[0234] 1. Stock Hammerhead Ribozyme Solutions:

[0235] a. flt-1 4229 (786 μM)—Active

[0236] b. flt-1 4229 (736 μM)—Inactive

[0237] 2. Experimantal Solutions/Groups:

[0238] Group 1 Solution 1 Control VEGF solution: 30 μM in 82 mM Tris base

[0239] Group 2 Solution 2 flt-1 4229 (1 μg/μL) in 30 μM VEGF/82 mM Tris base

[0240] Group 3 Solution 3 flt-1 4229 (10 μg/μL) in 30 M VEGF/82 mM Tris base

[0241] Group 4 Solution 4 No VEGF, flt-1 4229 (10 μg/μL) in 82 mM Tris base

[0242] Group 5 Solution 5 No VEGF, No ribozyme in 82 mM Tris base

[0243] 10 eyes per group, 5 animals (Since they have similar molecular weights, the molar concentrations should be essentially similar).

[0244] Each solution (VEGF and RIBOZYMES) were prepared as a 2× solution for 1:1 mixing for final concentrations above, with the exception of solution 1 in which VEGF was 2× and diluted with ribozyme diluent (sterile water).

[0245] 3. VEGF Solutions

[0246] The 2×VEGF solution (60 μM) was prepared from a stock of 0.82 μg/μL in 50 mM Tris base. 200 μL of VEGF stock was concentrated by speed vac to a final volume of 60.8 μL, for a final concentration of 2.7 μg/μL or 60 μM. Six 10 μL aliquots was prepared for daily mixing. 2× solutions for VEGF and Ribozyme was stored at 4° C. until the day of the surgery. Solutions were mixed for each day of surgery. Original 2× solutions was prepared on the day before the first day of the surgery.

[0247] 4. Surgical Solutions:

[0248] Anesthesia:

[0249] stock ketamine hydrochloride 100 mg/mL

[0250] stock xylazine hydrochloride 20 mg/mL

[0251] stock acepromazine 10 mg/mL

[0252] Final anesthesia solution: 50 mg/mL ketamine, 10 mg/mL xylazine, and 0.5 mg/mL acepromazine

[0253] 5% povidone iodine for opthalmic surgical wash

[0254] 2% lidocaine (sterile) for opthalmic administration (2 drops per eye)

[0255] sterile 0.9% NaCl for opthalmic irrigation

[0256] 5. Surgical Methods:

[0257] Standard surgical procedure as described in Pandey et al., supra. Filter disks were incubated in 1 μL of each solution for approximately 30 minutes prior to implantation.

[0258] 6. Experimental Protocol:

[0259] The animal cornea were treated with the treatment groups as described above. Animals were allowed to recover for 5 days after treatment with daily observation (scoring 0-3). On the fifth day animals were euthanized and digital images of each eye was obtained for quantitaion using Image Pro Plus. Quantitated neovascular surface area were analyzed by ANOVA followed by two post-hoc tests including Dunnets and Tukey-Kramer tests for significance at the 95% confidence level. Dunnets provide information on the significance between the differences within the means of treatments vs. controls while Tukey-Kramer provide information on the significance of differences within the means of each group.

[0260] The flt-1 4229 (SEQ ID NO: 5977) active hammerhead ribozyme at both concentrations was effective at inhibiting angiogenesis while the inactive ribozyme did not show any significant reduction in angiogenesis. A statistically signifiant reduction in neovascular surface area was observed only with active ribozymes. This result clearly shows that the ribozymes are capable of significantly inhibiting angiogenesis in vivo. Specifically, given ribozyme mechanism of action, the observed inhibition is by the binding and cleavage of target RNA by ribozymes.

### Example 2

### Bioactivity of Anti-Angiogenesis Ribozymes Targeting flt-1 and kdr RNA

[0261] Materials and Methods

[0262] Ribozymes: Hammerhead ribozymes and controls designed to have attenuated activity (attenuated controls) were synthesized and purified as previously described above. The attenuated ribozyme controls maintain the binding arm sequence of the parent ribozyme and thus are still capable of binding to the mRNA target. However, they have two nucleotide changes in the core sequence that substantially reduce their ability to carry out the cleavage reaction. Ribozymes were designed to target Flt-1 or KDR mRNA sites conserved in human, mouse, and rat. In general, ribozymes with binding arms of seven nucleotides were designed and tested. If, however, only six nucleotides surrounding the cleavage site were conserved in all three species, six nucleotide binding arms were used. Data are presented herein for 2′-NH₂ uridine modified ribozymes in cell proliferation studies and for 2′-C-allyl uridine modified ribozymes in RNAse protection, in vitro cleavage and corneal studies.

[0263] In vitro ribozyme cleavage assays: In vitro RNA cleavage rates on a 15 nucleotide synthetic RNA substrate were measured as previously described above.

[0264] Cell culture: Human dermal microvascular endothelial cells (HMVEC-d, Clonetics Corp.) were maintained at 37° C. in flasks or plates coated with 1.5% porcine skin gelatin (300 bloom, Sigma) in Growth medium (Clonetics Corp.) supplemented with 10-20% fetal bovine serum (FBS, Hyclone). Cells were grown to confluency and used up to the seventh passage. Stimulation medium consisted of 50% Sigma 99 media and 50% RPMI 1640 with L-glutamine and additional supplementation with 10 μg/mL Insulin-Transferrin-Selenium (Gibco BRL) and 10% FBS. Cell growth was stimulated by incubation in Stimulation medium supplemented with 20 ng/mL of either VEGF₁₆₅ or bFGF. VEGF₁₆₅ (165 amino acids) was selected for cell culture and animal studies because it is the predominant form of the four native forms of VEGF generated by alternative mRNA splicing. Cell culture assays were carried out in triplicate.

[0265] Ribozyme and Ribozyme/LIPOFECTAMINE™ Formulations:

[0266] Cell culture: Ribozymes or attenuated controls (50-200 nM) were formulated for cell culture studies and used immediately. Formulations were carried out with LIPOFECTAMINE™ (Gibco BRL) at a 3:1 lipid to phosphate charge ratio in serum-free medium (OPTI-MEM™, Gibco BRL) by mixing for 20 minutes at room temperature. For example, a 3:1 lipid to phosphate charge ratio was established by complexing 200 nM ribozyme with 10.8 μg/μL LIPOFECTAMINE™ (13.5 μM DOSPA).

[0267] In vivo: For corneal studies, lyophilized ribozyme or attenuated controls were resuspended in sterile water at a final stock concentration of 170 μg/μL (highest dose). Lower doses (1.7-50 μg/μL) were prepared by serial dilution in sterile water.

[0268] Proliferation assay: HMVEC-d were seeded (5×10³ cells/well) in 48-well plates (Costar) and incubated 24-30 hours in Growth medium at 37° C. After removal of the Growth medium, cells were treated with 50-200 nM LIPOFECTAMINE™ complexes of ribozyme or attenuated controls for 2 hours in OPTI-MEM™. The ribozyme/control-containing medium was removed and the cells were washed extensively in 1×PBS. The medium was then replaced with Stimulation medium or Stimulation medium supplemented with 20 ng/mL VEGF₁₆₅ or bFGF. After 48 hours, the cell number was determined using a Coulter™ cell counter. Data are presented as cell number per well following 48 hours of VEGF stimulation.

[0269] RNAse protection assay: HMVEC-d were seeded (2×10⁵ cells/well) in 6-well plates (Costar) and allowed to grow 32-36 hours in Growth medium at 37° C. Cells were treated with LIPOFECTAMINE™ complexes containing 200 nM ribozyme or attenuated control for 2 h as described under “Proliferation Assay” and then incubated in Growth medium containing 20 ng/mL VEGF₁₆₅ for 24 hours. Cells were harvested and an RNAse protection assay was carried out using the Ambion Direct Protect kit and protocol with the exception that 50 mM EDTA was added to the lysis buffer to eliminate the possibility of ribozyme cleavage during sample preparation. Antisense RNA probes targeting portions of Flt-1 and KDR were prepared by transcription in the presence of [³²P]-UTP. Samples were analyzed on polyacrylamide gels and the level of protected RNA fragments was quantified using a Molecular Dynamics PhosphorImager. The levels of Flt-1 and KDR were normalized to the level of cyclophilin (human cyclophilin probe template, Ambion) in each sample. The coefficient of variation for cyclophilin levels was 11% [265940 cpm±29386 (SD)] for all conditions tested here (i.e. in the presence of either active ribozymes or attenuated controls). Thus, cyclophilin is useful as an internal standard in these studies.

[0270] Rat Corneal Pocket Assay of VEGF-Induced Angiogenesis:

[0271] Animal guidelines and anesthesia. Animal housing and experimentation adhered to standards outlined in the 1996 Guide for the Care and Use of Laboratory Animals (National Research Council). Male Sprague Dawley rats (250-300 g) were anesthetized with ketamine (50 mg/kg), xylazine (10 mg/kg), and acepromazine (0.5 mg/kg) administered intramuscularly (im). The level of anesthesia was monitored every 2-3 min by applying hind limb paw pressure and examining for limb withdrawal. Atropine (0.4 mg/kg, im) was also administered to prevent potential corneal reflex-induced bradycardia.

[0272] Preparation of VEGF soaked disk. For corneal implantation, 0.57 mm diameter nitrocellulose disks, prepared from 0.45 μm pore diameter nitrocellulose filter membranes (Millipore Corporation), were soaked for 30 min in 1 μL of 30 μM VEGF₁₆₅ in 82 mM Tris HCl (pH 6.9) in covered petri dishes on ice.

[0273] Corneal surgery. The rat corneal model used in this study was a modified from Koch et al. Supra and Pandey et al., supra. Briefly, corneas were irrigated with 0.5% povidone iodine solution followed by normal saline and two drops of 2% lidocaine. Under a dissecting microscope (Leica MZ-6), a stromal pocket was created and a presoaked filter disk (see above) was inserted into the pocket such that its edge was 1 mm from the corneal limbus.

[0274] Intraconjunctival injection of test solutions. Immediately after disk insertion, the tip of a 40-50 μm OD injector (constructed in our laboratory) was inserted within the conjunctival tissue 1 mm away from the edge of the corneal limbus that was directly adjacent to the VEGF-soaked filter disk. Six hundred nanoliters of test solution (ribozyme, attenuated control or sterile water vehicle) were dispensed at a rate of 1.2 μL/min using a syringe pump (Kd Scientific). The injector was then removed, serially rinsed in 70% ethanol and sterile water and immersed in sterile water between each injection. Once the test solution was injected, closure of the eyelid was maintained using microaneurism clips until the animal began to recover gross motor activity. Following treatment, animals were warmed on a heating pad at 37° C.

[0275] Animal treatment groups/experimental protocol. Ribozymes targeting Flt-1 site 4229 (SEQ ID NO: 5977) and KDR mRNA site 726 (SEQ ID NO: 5978) were tested in the corneal model along with their attenuated controls. Five treatment groups were assigned to examine the effects of five doses of each test substance over a dose range of 1-100 μg on VEGF-stimulated angiogenesis. Negative (30 μM VEGF soaked filter disk and intraconjunctival injection of 600 nL sterile water) and no stimulus (Tris-soaked filter disk and intraconjunctival injection of sterile water) control groups were also included. Each group consisted of five animals (10 eyes) receiving the same treatment.

[0276] Quantitation of angiogenic response. Five days after disk implantation, animals were euthanized following im administration of 0.4 mg/kg atropine and corneas were digitally imaged. The neovascular surface area (NSA, expressed in pixels) was measured postmortem from blood-filled corneal vessels using computerized morphometry (Image Pro Plus, Media Cybernetics, v2.0). The individual mean NSA was determined in triplicate from three regions of identical size in the area of maximal neovascularization between the filter disk and the limbus. The number of pixels corresponding to the blood-filled corneal vessels in these regions was summated to produce an index of NSA. A group mean NSA was then calculated. Data from each treatment group were normalized to VEGF/ribozyme vehicle-treated control NSA and finally expressed as percent inhibition of VEGF-induced angiogenesis.

[0277] Statistics. After determining the normality of treatment group means, group mean percent inhibition of VEGF-induced angiogenesis was subjected to a one-way analysis of variance. This was followed by two post-hoc tests for significance including Dunnett's (comparison to VEGF control) and Tukey-Kramer (all other group mean comparisons) at alpha=0.05. Statistical analyses were performed using JMP v.3.1.6 (SAS Institute).

[0278] Results

[0279] Ribozyme-mediated reduction of VEGF-induced cell proliferation: Ribozyme cleavage of Flt-1 or KDR mRNA should result in a decrease in the density of cell surface VEGF receptors. This decrease should limit VEGF binding and consequently interfere with the mitogenic signaling induced by VEGF. To determine if cell proliferation was impacted by anti-Flt-1 and/or anti-KDR ribozyme treatment, proliferation assays using cultured human microvascular cells were carried out. Ribozymes included in the proliferation assays were initially chosen by their ability to decrease the level of VEGF binding to treated cells. In these initial studies, ribozymes targeting 20 sites in the coding region of each mRNA were screened. The most effective ribozymes against two sites in each target, Flt-1 sites 1358 and 4229 and KDR sites 726 and 3950, were included in the proliferation assays reported here. In addition, attenuated analogs of each ribozyme were used as controls. These attenuated controls are still capable of binding to the mRNA target since the binding arm sequence is maintained. However, these controls have two nucleotide changes in the core sequence that substantially reduce their ability to carry out the cleavage reaction.

[0280] The active ribozymes tested decreased the relative proliferation of HMVEC-d after VEGF stimulation, an effect that increased with ribozyme concentration. This concentration dependency was not observed following treatment with the attenuated controls designed for these sites. In fact, little or no change in cell growth was noted following treatment with the attenuated controls, even though these controls can still bind to the specific target sequences. At 200 nM, there was a distinct “window” between the anti-proliferative effects of each ribozyme and its attenuated control; a trend also observed at lower doses. This window of inhibition of proliferation (56-77% based on total cells/well) reflects the contribution of ribozyme-mediated activity. In comparison, no effect of anti-Flt-1 or anti-KDR ribozymes was noted on bFGF-stimulated cell proliferation. Moreover, an irrelevant, but active, ribozyme whose binding sequence is not found in either Flt-1 or KDR mRNA had no effect in this assay. These data are consistent with the basic ribozyme mechanism in which binding and cleavage are necessary components. Although the relative surface distribution of Flt-1 and KDR receptors in this cell type is not known, the antiproliferative effects of these ribozymes indicate that, at least in cell culture, both receptors are functionally coupled to proliferation.

[0281] Specific reduction of Flt-1 or KDR mRNA by ribozyme treatment: To confirm that anti-Flt-1 and anti-KDR ribozymes reduce their respective mRNA targets, cellular levels of Flt-1 or KDR were quantified using an RNAse protection assay with specific Flt-1 or KDR probes. For each target, one ribozyme/attenuated control pair was chosen for continued study. Exposure of HMVEC-d to active ribozyme targeting Flt-1 site 4229 decreased Flt-1 mRNA, but not KDR mRNA. Likewise, treatment with the active ribozyme targeting KDR site 726 decreased KDR, but not Flt-1 mRNA. Both ribozymes decreased the level of their respective target RNA by greater than 50%. The degree of reduction associated with the corresponding attenuated controls was not greater than 13%.

[0282] In Vitro Activity of Anti-Flt and Anti-KDR Ribozymes.

[0283] To confirm further the necessity of an active ribozyme core, in vitro cleavage activities were determined for the Flt-1 site 4229 ribozyme and the KDR site 726 ribozyme as well as their paired attenuated controls. The first order rate constants calculated from the time-course of short substrate cleavage for the anti-Flt-1 ribozyme and its attenuated control were 0.081±0.0007 min⁻¹ and 0.001±6×10⁻⁵ min⁻¹, respectively. For the anti-KDR ribozyme and its paired control, the first order rate constants were 0.434±0.024 min⁻¹ and 0.002±1×10⁻⁴ min⁻¹, respectively. Although the attenuated controls retain a very slight level of cleavage activity under these optimized conditions, the decrease in in vitro cleavage activity between each active ribozyme and its paired attenuated control is about two orders of magnitude. Thus, an active core is essential for cleavage activity in vitro and is also necessary for ribozyme activity in cell culture.

[0284] Ribozyme-mediated reduction of VEGF-induced angiogenesis in vivo. To assess whether ribozymes targeting VEGF receptor mRNA could impact the complex process of angiogenesis, prototypic anti-Flt-1 and KDR ribozymes that were identified in cell culture studies were screened in a rat corneal pocket assay of VEGF-induced angiogenesis. In this assay, corneas implanted with VEGF-containing filter disks exhibited a robust neovascular response in the corneal region between the disk and the corneal limbus (from which the new vessels emerge). Disks containing a vehicle solution elicited no angiogenic response. In separate studies, intraconjunctival injections of sterile water vehicle did not affect the magnitude of the VEGF-induced angiogenic response. In addition, ribozyme injections alone did not induce angiogenesis.

[0285] The dose-related effects of anti-Flt-1 or KDR ribozymes on the VEGF-induced angiogenic response were then examined. The antiangiogenic effect of the anti-Flt-1 (site 4229) and KDR (site 726) ribozymes and their attenuated controls over a dose range from 1 to 100 μg, respectively was determined. For both ribozymes, the maximal antiangiogenic response (48 and 36% for anti-Flt-1 and KDR ribozymes, respectively) was observed at a dose of 10 μg.

[0286] The anti-Flt-1 ribozyme produced a significantly greater antiangiogenic response than its attenuated control at 3 and 10 μg (p<0.05). Its attenuated control exhibited a small but significant antiangiogenic response at doses above 10 μg compared to vehicle treated VEGF controls (p<0.05). At its maximum, this response was not significantly greater than that observed with the lowest dose of active anti-Flt-1 ribozyme. The anti-KDR ribozyme significantly inhibited angiogenesis from 3 to 30 μg (p<0.05). The anti-KDR attenuated control had no significant effect at any dose tested.

### Example 3

### In Vivo Inhibition of Tumor Growth and Metastases by VEGF-R Ribozymes

[0287] A. Lewis Lung Carcinoma Mouse Model: Ribozymes were chemically synthesized as described above. The sequence of ANGIOZYME™ bound to its target RNA is shown in FIG. 1.

[0288] The tumors in this study were derived from a cell line (LLC-HM) which gives rise to reproducible numbers of spontaneous lung metastases when propagated in vivo. The LLC-HM line was obtained from Dr. Michael O'Reilly, Harvard University. Tumor neovascularization in Lewis lung carcinoma has been shown to be VEGF-dependent. Tumors from mice bearing LLC-HM (selected for the highly metastatic phenotype by serial propagation) were harvested 20 days post-inoculation. A tumor brei suspension was prepared from these tumors according to standard protocols. On day 0 of the study, 0.5×10⁶ viable LLC-HM tumor cells were injected subcutaneously (sc) into the dorsum or flank of previously untreated mice (100 μL injectate). Tumors were allowed to grow for a period of 3 days prior to initiating continuous intravenous administration of saline or 30 mg/kg/d ANGIOZYME™ via Alzet mini-pumps. One set of animals was dosed from days 3 to 17, inclusive. Tumor length and width measurements and volumes were calculated according to the formula: Volume=0.5(length)(width)². At post-inoculation day 25, animals were euthanized and lungs harvested. The number of lung macrometastatic nodules was counted. It should be noted that metastatic foci were quantified 8 days after the cessation of dosing. Ribozyme solutions were prepared to deliver to another set of animals 100, 10, 3, or 1 mg/kg/day of ANGIOZYME™ via Alzet mini-pumps. A total of 10 animals per dose or saline control group were surgically implanted on the left flank with osmotic mini-pumps pre-filled with the respective test solution three days following tumor inoculation. Pumps were attached to indwelling jugular vein catheters.

[0289] FIG. 2 shows the antitumor effects of ANGIOZYME™. There is a statistically significant inhibition (p<0.05) of primary LLC-HM tumor growth in tumors grown in the flank regions compared to saline control. ANGIOZYME™ significantly reduced (p<0.05) the number of lung metastatic foci in animals inoculated either in the flank regions. FIG. 3 illustrates the dose-dependent anti-metastatic effect of ANGIOZYME™ compared to saline control.

[0290] B. Mouse Colorectal Cancer Model. KM12L4a-16 is a human colorectal cancer cell line. On day 0 of the study, 0.5×10⁶ KM12L4a-16 cells were implanted into the spleen of nude mice. Three days after tumor inoculation, Alzet minipumps were implanted and continuous subcutaneous delivery of either saline or 12, 36 or 100 mg/kg/day of ANGIOZYMET was initiated. On day 5, the spleens containing the primary tumors were removed. On day 18, the Alzet minipumps were replaced with fresh pumps so that delivery of saline or ANGIOZYME™ was continuous over a 28 day period from day 3 to day 32. Animals were euthanized on day 41 and the liver tumor burden was evaluated.

[0291] Following treatment with 100 mg/kg/day of ANGIOZYME™, there was a significant reduction in the incidence and median number of liver metastasis (FIG. 4). In saline-treated animals, the median number of metastases was ≧101. However, at the high dose of ANGIOZYME™ (100 mg/kg/day), the median number of metastases was zero.

### Example 4

### Effect of ANGIOZYME™ Alone or in Combination with Chemotherapeutic Agents in the Mouse Lewis Lung Carcinoma Model

[0292] Methods

[0293] Tumor inoculations. Male C57/BL6 mice, age 6 to 8 weeks, were inoculated subcutaneously in the flank with 5×10⁵ LLC-HM cells from brei preparations made from tumors grown in mice.

[0294] Ribozymes and controls. RPI.4610, also known as ANGIOZYME™ (SEQ ID NO: 5977), is an anti-Flt-1 ribozyme that targets site 4229 in the human Flt-1 receptor mRNA (EMBL accession no. X51602). The controls tested include RPI.13141, an attenuated version of RPI.4610 in which four nucleotides in the catalytic core are changed so that the cleavage activity is dramatically decreased. RPI.13141, however, maintains the base composition and binding arms of RPI.4610 and so is still capable of binding to the target site. The second control (RPI.13030) also has changes to the catalytic core (three) to inhibit cleavage activity, but in addition the sequence of the binding arms has been scrambled so that it can no longer bind to the target sequence. One nucleotide in the arm of RPI.13030 is also changed to maintain the same base composition as RPI.4610.

[0295] Ribozyme administrations. Ribozymes and controls were resuspended in normal saline. Administration was initiated seven days following tumor inoculation. Animals either received a daily subcutaneous injection (30 mg/kg test substance) from day 7 to day 20 or were instrumented with an Alzet osmotic minipump (12 μL/day flow rate) containing a solution of ribozyme or control. Subcutaneous infusion pumps delivered the test substances (30 mg/kg/day) from day 7 to 20 (14-day pumps, 420 mg/kg total test substance) or days 7-34 (28-day pumps, 840 mg/kg total test substance). Where indicated, chemotherapeutic agents were given in combination with ribozyme treatment. Cyclophosphamide was given by intraperitoneal administration on days 7, 9 and 11 (125 mg/kg). Gemcitabine was given by intraperitoneal administration on days 8, 11 and 14 (125 mg/kg). Untreated, uninstrumented animals were used as comparison. Five animals were included in each group.

[0296] Results

[0297] The antiangiogenic ribozyme, ANGIOZYME™, was tested in a model of Lewis lung carcinoma alone and in combination with two chemotherapeutic agents. Previously (see above), 30 mg/kg/day ANGIOZYME™ alone was determined to inhibit both primary tumor growth and lung metastases in a highly metastatic variant of Lewis lung (continuous 14-day iv delivery via Alzet minipump, manuscript in preparation).

[0298] In this study, 30 mg/kg/day ANGIOZYME™ delivered either as a daily subcutaneous bolus injection or as a continuous infusion from an Alzet minipump resulted in a delay in tumor growth. On average, tumor growth to 500 mm³ was delayed by ˜7 days in animals being treated with ANGIOZYME™ compared to an untreated group. Growth of tumors in animals being treated with either of two attenuated controls was delayed by only ˜2 days.

[0299] ANGIOZYME™ delivered by subcutaneous bolus was also tested in combination with either Gemcytabine or cyclophosphamide. Tumor growth delay increased by about 3 days in the presence of combination therapy with ANGIOZYME™ and Gemcytabine over the effects of either treatment alone. The combination of ANGIOZYME™ and cyclophosphamide did not increase tumor growth delay over that of cyclophosphamide alone, however, suboptimal doses of cyclophosphamide were not included in this study. Neither of the attenuated controls increased the effect of the chemotherapeutic agents.

[0300] The effect of ANGIOZYME™ on metastases to the lung was also determined in the presence and absence of additional chemotherapeutic treatment. Macrometastases to the lungs were counted in two animals in each treatment group on day 20. In the presence of ANGIOZYME™, with or without a chemotherapeutic agent, the lung metastases were reduced to zero. Treatment with either Gemcytabine or cyclophosphamide alone (mean number of metastases 4.5 and 4, respectively) were not as effective as ANGIOZYME™ alone or when used in combination with ANGIOZYME™. Neither of the attenuated controls increased the effect of the chemotherapeutic agents.

[0301] The effect on metastases to the lung was also determined following continuous treatment with ANGIOZYME™. At day 20, an average of 8 macrometastases were noted in the treatment groups which had been instrumented with Alzet minipumps (either 14- or 28-day pumps). This is a decrease in metastases of ˜50% from the untreated group. Since ANGIOZYME™ delivered by a daily subcutaneous bolus resulted in zero metastases (FIG. 4) in the two animals counted, it is possible that the additional burden of being instrumented with the minipump contributes to a slightly decreased response to ANGIOZYME™.

### Example 5

### Identification of Potential Target Sites in Human VEGFR1 and/or VEGFR2 RNA

[0302] The sequence of human VEGFR1 and/or VEGFR2 genes are screened for accessible sites using a computer-folding algorithm. Regions of the RNA that do not form secondary folding structures and contain potential enzymatic nucleic acid molecule and/or antisense binding/cleavage sites are identified. An exemplary sequence of an enzymatic nucleic acid molecule of the invention is shown in Formula I and/or Formula II (SEQ ID Nos: 5977 and 5978, respectively). Other nucleic acid molecules and targets contemplated by the invention are described in Pavco et al., U.S. patent application Ser. No. 09/870,161, incorporated by reference herein in its entirety. Similarly, other nucleic acid molecules of the invention, including antisense, aptamers, dsRNA, siRNA, and/or 2,5-A chimeras, can be designed to modulate the expression of the nucleic acid targets described in Pavco et al., U.S. patent application Ser. No. 09/870,161.

### Example 6

### Selection of Enzymatic Nucleic Acid Cleavage Sites in Human VEGFR1 and/or VEGFR2 RNA

[0303] Enzymatic nucleic acid molecule target sites are chosen by analyzing sequences of human VEGFR1 receptor (for example Genbank Accession No. NM_{—}002019), and VEGFR2 receptor (for example Genbank Accession No. NM_{—}002253) genes and prioritizing the sites on the basis of folding. Enzymatic nucleic acid molecules are designed that can bind each target and are individually analyzed by computer folding (Christoffersen et al., 1994 J. Mol. Struc. Theochem, 311, 273; Jaeger et al., 1989, Proc. Natl. Acad. Sci. USA, 86, 7706) to assess whether the enzymatic nucleic acid molecule sequences fold into the appropriate secondary structure. Those enzymatic nucleic acid molecules with unfavorable intramolecular interactions between the binding arms and the catalytic core can be eliminated from consideration. As discussed herein, varying binding arm lengths can be chosen to optimize activity. Generally, at least 4 bases on each arm are able to bind to, or otherwise interact with, the target RNA.

### Example 7

### Chemical Synthesis and Purification of Ribozymes and Antisense for Efficient Cleavage and/or Blocking of VEGFR1 and/or VEGFR2 RNA

[0304] Enzymatic nucleic acid molecules and antisense constructs are designed to anneal to various sites in the RNA message. The binding arms of the enzymatic nucleic acid molecules are complementary to the target site sequences described above, while the antisense constructs are fully complementary to the target site sequences described above. RNAi molecules (dsRNA) likewise have one strand of RNA or a portion of RNA complementarity to the target site sequence or a portion of the target site sequence. For example, complementarity within the double-strand RNAi structure is formed from two separate individual RNA strands or from self-complementary areas of a topologically closed, individual RNA strand which can be optionally circular. The nucleic acid molecules were chemically synthesized. The method of synthesis used followed the procedure for normal RNA synthesis as described above and in Usman et al., (1987 J. Am. Chem. Soc., 109, 7845), Scaringe et al., (1990 Nucleic Acids Res., 18, 5433) and Wincott et al., supra, and made use of common nucleic acid protecting and coupling groups, such as dimethoxytrityl at the 5′-end, and phosphoramidites at the 3′-end. The average stepwise coupling yields were typically >98%.

[0305] Nucleic acid molecules are also synthesized from DNA templates using bacteriophage T7 RNA polymerase (Milligan and Uhlenbeck, 1989, Methods Enzymol. 180, 51). Nucleic acid molecules of the invention are purified by gel electrophoresis using general methods or are purified by high pressure liquid chromatography (HPLC; See Wincott et al., supra; the totality of which is hereby incorporated herein by reference) and are resuspended in water. Examples of sequences of chemically synthesized enzymatic nucleic acid molecules are shown in Formula I (SEQ ID NO: 5977), Formula II (SEQ ID NO: 5978) and in Pavco et al., U.S. patent application Ser. No. 09/870,161.

### Example 8

### Enzymatic Nucleic Acid Molecule Cleavage of VEGFR1 and/or VEGFR2 RNA Target In Vitro

[0306] Enzymatic nucleic acid molecules targeted to the human VEGFR1 and/or VEGFR2 RNA are designed and synthesized as described above. These enzymatic nucleic acid molecules can be tested for cleavage activity in vitro, for example, using the following procedure. The target sequences and the nucleotide location within the VEGFR1 and/or VEGFR2 RNA are described in Pavco et al., U.S. patent application Ser. No. 09/870,161.

[0307] Cleavage Reactions: Full-length or partially full-length, internally-labeled target RNA for enzymatic nucleic acid molecule cleavage assay is prepared by in vitro transcription in the presence of [α-³²P] CTP, passed over a G 50 Sephadex column by spin chromatography and used as substrate RNA without further purification. Alternately, substrates are 5′-³²P-end labeled using T4 polynucleotide kinase enzyme. Assays are performed by pre-warming a 2× concentration of purified enzymatic nucleic acid molecule in enzymatic nucleic acid molecule cleavage buffer (50 mM Tris-HCl, pH 7.5 at 37° C., 10 mM MgCl₂) and the cleavage reaction was initiated by adding the 2× enzymatic nucleic acid molecule mix to an equal volume of substrate RNA (maximum of 1-5 nM) that was also pre-warmed in cleavage buffer. As an initial screen, assays are carried out for 1 hour at 37° C. using a final concentration of either 40 nM or 1 mM enzymatic nucleic acid molecule, i.e., enzymatic nucleic acid molecule excess. The reaction is quenched by the addition of an equal volume of 95% formamide, 20 mM EDTA, 0.05% bromophenol blue and 0.05% xylene cyanol after which the sample is heated to 95° C. for 2 minutes, quick chilled and loaded onto a denaturing polyacrylamide gel. Substrate RNA and the specific RNA cleavage products generated by enzymatic nucleic acid molecule cleavage are visualized on an autoradiograph of the gel. The percentage of cleavage is determined by Phosphor Imager® quantitation of bands representing the intact substrate and the cleavage products.

### Example 9

### Phase I/II Study of Repetitive Dosing of ANGIOZYME™ Targeting the VEGFR1 (FLT-1) Receptor of VEGF

[0308] A ribozyme therapeutic agent ANGIOZYME™ (SEQ ID NO: 5977), was assessed by daily subcutaneous administration in a phase I/II trial for 31 patients with refractory solid tumors. Demographic information relating to patients enrolled in the study are shown in Table III. The primary study endpoint was to determine the safety and maximum tolerated dose of ANGIOZYME™. Secondary endpoints assessed ANGIOZYME™ pharmacokinetics and clinical response. Patients were treated at the following doses: 3 patients received doses of 10 mg/m²/day, 4 patients received 30 mg/m²/day, 20 patients received 100 mg/m²/day, and 4 patients received 300 mg/m²/day. All but one patient were dosed for a minimum of 29 consecutive days with 24-hour pharmacokinetic analyses on Day 1 and 29. Clinical response was assessed monthly. Results The data from 20 patients indicated that ANGIOZYME™ was well tolerated, with no systemic adverse events. FIG. 5 shows the plasma concentration profile of ANGIOZYME™ after a single subcutaneous dose of 10, 30, 100, or 300 mg/m². The pharmacokinetic parameters of ANGIOZYME™ after subcutaneous bolus administration are outlined in Table IV. An MTD (maximum tolerated dose) could not be established. One patient in the 300 mg/m²/d group experienced a grade 3 injection site reaction. Patients in the other groups experienced intermittent grade 1 and grade 2 injection site reactions with erythema and induration. No systemic or laboratory toxicities were observed. Pharmacokinetic analyses demonstrated dose-dependent plasma concentrations with good bioavailability (70-90%), t1/2=209-384 min, and no accumulation after repeated doses. To date, 17/28 (61%) of evaluable patients have had stable disease for periods of one to six months and two patients (nasopharyngeal squamous cell carcinoma and melanoma) had minor clinical responses. The patient with nasopharyngeal carcinoma demonstrated central tumor necrosis as indicated by MRI. The longest period of treatment thus far has been 8 months for two patients at 100 mg/m²/d (breast, peritoneal mesothelioma).

### Example 10

### Down-Regulation of VEGFR1 Gene Expression to Treat Gynecologic Neovascularization Dependent Conditions

[0309] One patient in the Phase LIU trial described in Example 19 was menstruating prior to enrollment in the ANGIOZYME™ monotherapy trial. After 1-2 months on trial, the patient's menstrual cycles ceased. The patient remained on trial for approximately 11 months and did not menstruate. The patient then went off the trial for about 4 months and the menstrual cycles resumed. Re-enrollment in the ANGIOZYME™ trial resulted in the patient's menstrual cycle stopping again. This clinical observation suggests that ANGIOZYME™ is interfering with the patient's menstrual cycle, perhaps by inhibiting neovascularization of uterine tissue. This data also suggests that ANGIOZYME™ has a direct effect on the endometrial tissue or an effect on LH/FSH stimulation. These results suggest the treatment or control, using ANGIOZYME™ (SEQ ID NO: 5977) and/or other nucleic acid molecules of the instant invention, of various clinical targets and/or processes associated with female reproduction and gynecologic neovascularization, such as endometriosis, birth control, gynecologic bleeding disorders, irregular menstrual cycles, ovulation, premenstrual syndrome (PMS), menopausal dysfunction, endometrial carcinoma or other condition associated with the expression of VEGFR1 and/or VEGFR2 VEGF receptors.

### Example 11

### Down-Regulation of VEGFR1 in Clinical Setting

[0310] Twenty-seven of the patients enrolled in the Phase I/II trial described in Example 19 had day 1 (baseline) and day 43 (six-week) serum samples assayed for VEGFR1 biomarker. VEGFR1 levels were statistically different after six weeks of ANGIOZYME treatment (FIG. 9). Although statistical testing involving all 27 patients showed statistical support for effects, not all patients presented with elevated levels of VEGF-R1. Since the effects of ANGIOZYME on VEGF-R1 may only be demonstrated when sufficient levels are present at baseline, a cutoff of 100 pg/mL was chosen and changes in this VEGF-R1 were re-analyzed. Ten of the 27 patients presented with baseline VEGF-R1 levels in excess of 100 pg/mL. For this subgroup VEGF-R1 levels were lower by 3-fold, p<0.001. After six weeks of treatment the average (geometric mean) of VEGF-R1 decreased for this subgroup from 419 pg/ml to 132 pg/ml, p<0.001. These results show that treatment with ANGIOZYME results in a statistically significant reduction in VEGFR1 expression.

### Example 22

### In Vivo Inhibition of Neovascularization in an Ocular Animal Model by VEGF-R Ribozymes

[0311] Summary of the Mouse Model: A mouse model of proliferative retinopathy (Aiello et al., 1995, Proc. Natl. Acad. Sci. USA 92: 10457-10461; Robinson et al., 1996, Proc. Natl. Acad. Sci. USA 93: 4851-4856; Pierce et al., 1996, Archives of Ophthalmology 114: 1219-1228) in which neovascularization of the mouse retina is induced by exposure of 7-day old mice to 75% oxygen followed by a return to normal room air. The initial period in high oxygen causes an obliteration of developing blood vessels in the retina. Exposure to room air five days later is perceived as hypoxia by the now underperfused retina. The result is an immediate upregulation of VEGF mRNA and VEGF protein (between 6-12 hours) followed by an extensive retinal neovascularization that peaks in ˜5 days. Although this model is more representative of retinopathy of prematurity than diabetic retinopathy, it is an accepted small animal model in which to study neovascular pathophysiology of the retina. In fact, intravitreal injection of certain antisense DNA constructs targeting VEGF mRNA have been found to be antiangiogenic in this model, as were soluble VEGF receptor chimeric proteins designed to bind VEGF in the vitreous humor (Aiello et al., 1995, Proc. Natl. Acad. Sci. USA 92: 10457-10461; Robinson et al., 1996, Proc. Natl. Acad. Sci. USA 93: 4851-4856; Pierce et al., 1996, Archives of Ophthalmology 114: 1219-1228).

[0312] Summary of experiment: The effect of an anti-KDR/Flk-1 ribozyme on the peak level of neovascularization was tested in the mouse model described above. As shown in FIG. 10, P7 mice were removed from the hyperoxic chamber and the mice received two intraocular injections (P12 and P13) in the right eye of 10 μg RPI.4731, the anti-KDR/Flk-1 ribozyme. The left eye of each mouse was treated as a control and received intraocular injections of saline. Five days after being exposed to room air, neovascular nuclei in the retina of both eyes were counted. Data are presented in FIG. 11. There was a significant decrease in retinal neovascularization (˜40%) compared to the control, saline-injected eyes.

[0313] RPI.4731 sequence and chemical composition:

| | |
|---|---|
| 5′-uₛaₛcₛ aₛau ucU GAu Gag gcg | (SEQ ID NO: 5978) |
| aaa gcc Gaa Aag aca aB-3′ | |

[0314] where:

[0315] uppercase G, A=ribonucleotides

[0316] lowercase=2′-OMe

[0317] U=2′-C-allyl uridine

[0318] B=inverted abasic nucleotide

[0319] S=phosphorothioate internucleotide linkage

[0320] Indications

[0321] 1) Tumor angiogenesis: Angiogenesis has been shown to be necessary for tumors to grow into pathological size (Folkman, 1971, PNAS 76, 5217-5221; Wellstein & Czubayko, 1996, Breast Cancer Res and Treatment 38, 109-119). In addition, it allows tumor cells to travel through the circulatory system during metastasis. Increased levels of gene expression of a number of angiogenic factors such as vascular endothelial growth factor (VEGF) have been reported in vascularized and edema-associated brain tumors (Berkman et al., 1993 J. Clini. Invest. 91, 153). A more direct demostration of the role of VEGF in tumor angiogenesis was demonstrated by Jim Kim et al., 1993 Nature 362,841 wherein, monoclonal antibodies against VEGF were successfully used to inhibit the growth of rhabdomyosarcoma, glioblastoma multiforme cells in nude mice. Similarly, expression of a dominant negative mutated form of the flt-1 VEGF receptor inhibits vascularization induced by human glioblastoma cells in nude mice (Millauer et al., 1994, Nature 367, 576). Specific tumor/cancer types that can be targeted using the nucleic acid molecules of the invention include but are not limited to the tumor/cancer types described under Diagnosis in Table III.

[0322] 2) Ocular diseases: Neovascularization has been shown to cause or exacerbate ocular diseases including but not limited to, macular degeneration, neovascular glaucoma, diabetic retinopathy, myopic degeneration, and trachoma (Norrby, 1997, APMIS 105, 417-437). Aiello et al., 1994 New Engl. J. Med. 331, 1480, showed that the ocular fluid, of a majority of patients suffering from diabetic retinopathy and other retinal disorders, contains a high concentration of VEGF. Miller et al., 1994 Am. J. Pathol. 145, 574, reported elevated levels of VEGF mRNA in patients suffering from retinal ischemia. These observations support a direct role for VEGF in ocular diseases. Other factors including those that stimulate VEGF synthesis may also contribute to these indications.

[0323] 3) Dermatological Disorders: Many indications have been identified which may by angiogenesis dependent including but not limited to psoriasis, verruca vulgaris, angiofibroma of tuberous sclerosis, pot-wine stains, Sturge Weber syndrome, Kippel-Trenaunay-Weber syndrome, and Osler-Weber-Rendu syndrome (Norrby, supra). Intradermal injection of the angiogenic factor b-FGF demonstrated angiogenesis in nude mice (Weckbecker et al., 1992, Angiogenesis: Key principles-Science-Technology-Medicine, ed R. Steiner) Detmar et al., 1994 J. Exp. Med. 180, 1141 reported that VEGF and its receptors were over-expressed in psoriatic skin and psoriatic dermal microvessels, suggesting that VEGF plays a significant role in psoriasis.

[0324] 4) Rheumatoid arthritis: Immunohistochemistry and in situ hybridization studies on tissues from the joints of patients suffering from rheumatoid arthritis show an increased level of VEGF and its receptors (Fava et al., 1994 J. Exp. Med. 180, 341). Additionally, Koch et al., 1994 J. Immunol. 152, 4149, found that VEGF-specific antibodies were able to significantly reduce the mitogenic activity of synovial tissues from patients suffering from rheumatoid arthritis. These observations support a direct role for VEGF in rheumatoid arthritis. Other angiogenic factors including those of the present invention may also be involved in arthritis.

[0325] 5) Endometriosis: Various studies indicate that VEGF is directly implicated in endometriosis. In one study, VEGF concentrations measured by ELISA in peritoneal fluid were found to be significantly higher in women with endometriosis than in women without endometriosis (24.1±15 ng/ml vs 13.3±7.2 ng/ml in normals). In patients with endometriosis, higher concentrations of VEGF were detected in the proliferative phase of the menstrual cycle (33±13 ng/ml) compared to the secretory phase (10.7±5 ng/ml). The cyclic variation was not noted in fluid from normal patients (McLaren et al., 1996, Human Reprod. 11, 220-223). In another study, women with moderate to severe endometriosis had significantly higher concentrations of peritoneal fluid VEGF than women without endometriosis. There was a positive correlation between the severity of endometriosis and the concentration of VEGF in peritoneal fluid. In human endometrial biopsies, VEGF expression increased relative to the early proliferative phase approximately 1.6-, 2-, and 3.6-fold in midproliferative, late proliferative, and secretory endometrium (Shifren et al., 1996, J. Clin. Endocrinol. Metab. 81, 3112-3118).

[0326] In a third study, VEGF-positive staining of human ectopic endometrium was shown to be localized to macrophages (double immunofluorescent staining with CD14 marker). Peritoneal fluid macrophages demonstrated VEGF staining in women with and without endometriosis. However, increased activation of macrophages (acid phosphatatse activity) was demonstrated in fluid from women with endometriosis compared with controls. Peritoneal fluid macrophage conditioned media from patients with endometriosis resulted in significantly increased cell proliferation ([³H] thymidine incorporation) in HUVEC cells compared to controls. The percentage of peritoneal fluid macrophages with VEGFR2 mRNA was higher during the secretory phase, and significantly higher in fluid from women with endometriosis (80±15%) compared with controls (32±20%). Flt-mRNA was detected in peritoneal fluid macrophages from women with and without endometriosis, but there was no difference between the groups or any evidence of cyclic dependence (McLaren et al., 1996, J. Clin. Invest. 98, 482-489).

[0327] In the early proliferative phase of the menstrual cycle, VEGF has been found to be expressed in secretory columnar epithelium (estrogen-responsive) lining both the oviducts and the uterus in female mice. During the secretory phase, VEGF expression was shown to have shifted to the underlying stroma composing the functional endometrium. In addition to examining the endometrium, neovascularization of ovarian follicles and the corpus luteum, as well as angiogenesis in embryonic implantation sites have been analyzed. For these processes, VEGF was expressed in spatial and temporal proximity to forming vasculature (Shweiki et al., 1993, J. Clin. Invest. 91, 2235-2243).

[0328] The present body of knowledge in VEGFR1 and/or VEGFR2 research indicates the need for methods to assay VEGFR1 and/or VEGFR2 activity and for compounds that can regulate VEGFR1 and/or VEGFR2 expression for research, diagnostic, and therapeutic use. As described herein, the nucleic acid molecules of the present invention can be used in assays to diagnose disease state related of VEGF, VEGFR1 and/or VEGFR2 levels. In addition, the nucleic acid molecules can be used to treat disease state related to VEGF and/or VEGFr, such as VEGFR1 and/or VEGFR2 levels.

[0329] Particular processes, diseases, or conditions that can be associated with VEGFR1 and/or VEGFR2 levels include, but are not limited to, gynecologic neovascularization, such as endometriosis, endometrial carcinoma, gynecologic bleeding disorders, irregular menstrual cycles, ovulation, premenstrual syndrome (PMS), menopausal dysfunction, other diseases and conditions discussed herein, and other diseases or conditions that are related to or respond to the levels of VEGF and/or VEGFr, such as VEGFR1 and/or VEGFR2, in a cell or tissue, alone or in combination with other therapies

[0330] The use of GNRH (gonadotropin releasing hormone) agonists, Lupron Depot (Leuprolide Acetate), Synarel (naferalin acetate), Zolodex (goserelin acetate), Suprefact (buserelin acetate), Danazol, or oral contraceptives including, but not limited to, Depo-Provera or Provera (medroxyprogesterone acetate), or any other estrogen/progesterone contraceptive, are all non-limiting examples of compounds and methods that can be combined with or used in conjunction with the nucleic acid molecules of the instant invention. Various chemotherapies can be readily combined with nucleic acid molecules of the invention for the treatment of endometrial carcinoma. Common chemotherapies that can be combined with nucleic acid molecules of the instant invention include various combinations of cytotoxic drugs to kill the cancer cells. These drugs include but are not limited to paclitaxel (Taxol), docetaxel, cisplatin, methotrexate, cyclophosphamide, doxorubin, fluorouracil carboplatin, edatrexate, gemcitabine, vinorelbine etc. Those skilled in the art will recognize that other drug compounds and therapies can be readily combined with the nucleic acid molecules of the instant invention and are hence within the scope of the instant invention.

[0331] Animal Models

[0332] There are several animal models in which the anti-angiogenesis effect of nucleic acids of the present invention, such as ribozymes, directed against VEGF-R mRNAs can be tested. Typically, a corneal model has been used to study angiogenesis in rat and rabbit since recruitment of vessels can easily be followed in this normally avascular tissue (Pandey et al., 1995 Science 268: 567-569). In these models, a small Teflon or Hydron disk pretreated with an angiogenesis factor (e.g. bFGF or VEGF) is inserted into a pocket surgically created in the cornea. Angiogenesis is monitored 3 to 5 days later. Ribozymes directed against VEGF-R mRNAs would be delivered in the disk as well, or dropwise to the eye over the time course of the experiment. In another eye model, hypoxia has been shown to cause both increased expression of VEGF and neovascularization in the retina (Pierce et al., 1995 Proc. Natl. Acad. Sci. USA. 92: 905-909; Shweiki et al., 1992 J. Clin. Invest. 91: 2235-2243).

[0333] In human glioblastomas, it has been shown that VEGF is at least partially responsible for tumor angiogenesis (Plate et al., 1992 Nature 359, 845). Animal models have been developed in which glioblastoma cells are implanted subcutaneously into nude mice and the progress of tumor growth and angiogenesism is studied (Kim et al., 1993 supra; Millauer et al., 1994 supra).

[0334] Another animal model that addresses neovascularization involves Matrigel, an extract of basement membrane that becomes a solid gel when injected subcutaneously (Passaniti et al., 1992 Lab. Invest. 67: 519-528). When the Matrigel is supplemented with angiogenesis factors such as VEGF, vessels grow into the Matrigel over a period of 3 to 5 days and angiogenesis can be assessed. Ribozymes directed against VEGF-R mRNAs can be delivered in the Matrigel to assess anti-angiogesis effect.

[0335] Several animal models exist for screening of anti-angiogenic agents. These include corneal vessel formation following corneal injury (Burger et al., 1985 Cornea 4: 35-41; Lepri, et al., 1994 J. Ocular Pharmacol. 10: 273-280; Ormerod et al., 1990 Am. J. Pathol. 137: 1243-1252) or intracorneal growth factor implant (Grant et al., 1993 Diabetologia 36: 282-291; Pandey et al. 1995 supra; Zieche et al., 1992 Lab. Invest. 67: 711-715), vessel growth into Matrigel matrix containing growth factors (Passaniti et al., 1992 supra), female reproductive organ neovascularization following hormonal manipulation (Shweiki et al., 1993 Clin. Invest. 91: 2235-2243), several models involving inhibition of tumor growth in highly vascularized solid tumors (O'Reilly et al., 1994 Cell 79: 315-328; Senger et al., 1993 Cancer and Metas. Rev. 12: 303-324; Takahasi et al., 1994 Cancer Res. 54: 4233-4237; Kim et al., 1993 supra), and transient hypoxia-induced neovascularization in the mouse retina (Pierce et al., 1995 Proc. Natl. Acad. Sci. USA. 92: 905-909).

[0336] The cornea model, described in Pandey et al. supra, is the most common and well characterized anti-angiogenic agent efficacy screening model. This model involves an avascular tissue into which vessels are recruited by a stimulating agent (growth factor, thermal or alkalai burn, endotoxin). The corneal model utilizes the intrastromal corneal implantation of a Teflon pellet soaked in a VEGF-Hydron solution to recruit blood vessels toward the pellet which can be quantitated using standard microscopic and image analysis techniques. To evaluate their anti-angiogenic efficacy, ribozymes are applied topically to the eye or bound within Hydron on the Teflon pellet itself. This avascular cornea as well as the Matrigel (see below) provide for low background assays. While the corneal model has been performed extensively in the rabbit, studies in the rat have also been conducted.

[0337] The mouse model (Passaniti et al., supra) is a non-tissue model which utilizes Matrigel, an extract of basement membrane (Kleinman et al., 1986) or Millipore® filter disk, which can be impregnated with growth factors and anti-angiogenic agents in a liquid form prior to injection. Upon subcutaneous administration at body temperature, the Matrigel or Millipore® filter disk forms a solid implant. VEGF embedded in the Matrigel or Millipore® filter disk would be used to recruit vessels within the matrix of the Matrigel or Millipore® filter disk which can be processed histologically for endothelial cell specific vWF (factor VIII antigen) immunohistochemistry, Trichrome-Masson stain, or hemoglobin content. Like the cornea, the Matrigel or Millipore® filter disk are avascular; however, it is not tissue. In the Matrigel or Millipore® filter disk model, ribozymes are administered within the matrix of the Matrigel or Millipore® filter disk to test their anti-angiogenic efficacy. Thus, delivery issues in this model, as with delivery of ribozymes by Hydron-coated Teflon pellets in the rat cornea model, are minimized due to the homogeneous presence of the ribozyme within the respective matrix.

[0338] These models offer a distinct advantage over several other angiogenic models listed previously. The ability to use VEGF as a pro-angiogenic stimulus in both models is highly desirable since ribozymes target only VEGFr mRNA. In other words, the involvement of other non-specific types of stimuli in the cornea and Matrigel models is not advantageous from the standpoint of understanding the pharmacologic mechanism by which the anti-VEGFr mRNA ribozymes produce their effects. In addition, the models allow for testing the specificity of the anti-VEGFr mRNA ribozymes by using either aFGF or bFGF as a pro-angiogenic factor. Vessel recruitment using FGF should not be affected in either model by anti-VEGFr mRNA ribozymes. Other models of angiogenesis, including vessel formation in the female reproductive system using hormonal manipulation (Shweiki et al., 1993 supra); a variety of vascular solid tumor models which involve indirect correlations with angiogenesis (O'Reilly et al., 1994 supra; Senger et al., 1993 supra; Takahasi et al., 1994 supra; Kim et al., 1993 supra); and retinal neovascularization following transient hypoxia (Pierce et al., 1995 supra), were not selected for efficacy screening due to their non-specific nature, although they can be useful models due to a demonstrated correlation between VEGF and angiogenesis.

[0339] Other model systems to study tumor angiogenesis is reviewed by Folkman, 1985 Adv. Cancer. Res. 43, 175.

[0340] Use of Murine Models

[0341] For a typical systemic study involving 10 mice (20 g each) per dose group, 5 doses (1, 3, 10, 30 and 100 mg/kg daily over 14 days continuous administration), approximately 400 mg of ribozyme, formulated in saline would be used. A similar study in young adult rats (200 g) would require over 4 g. Parallel pharmacokinetic studies involve the use of similar quantities of ribozymes further justifying the use of murine models.

[0342] Ribozymes and Lewis Lung Carcinoma and B-16 Melanoma Murine Models

[0343] Identifying a common animal model for systemic efficacy testing of ribozymes is an efficient way of screening ribozymes for systemic efficacy.

[0344] The Lewis lung carcinoma and B-16 murine melanoma models are well accepted models of primary and metastatic cancer and are used for initial screening of anti-cancer agents. These murine models are not dependent upon the use of immunodeficient mice, are relatively inexpensive, and minimize housing concerns. Both the Lewis lung and B-16 melanoma models involve subcutaneous implantation of approximately 10⁶ tumor cells from metastatically aggressive tumor cell lines (Lewis lung lines 3LL or D122, LLc-LN7; B-16-BL6 melanoma) in C57BL/6J mice. Alternatively, the Lewis lung model can be produced by the surgical implantation of tumor spheres (approximately 0.8 mm in diameter). Metastasis also can be modeled by injecting the tumor cells directly intraveneously. In the Lewis lung model, microscopic metastases can be observed approximately 14 days following implantation with quantifiable macroscopic metastatic tumors developing within 21-25 days. The B-16 melanoma exhibits a similar time course with tumor neovascularization beginning 4 days following implantation. Since both primary and metastatic tumors exist in these models after 21-25 days in the same animal, multiple measurements can be taken as indices of efficacy. Primary tumor volume and growth latency as well as the number of micro- and macroscopic metastatic lung foci or number of animals exhibiting metastases can be quantitated. The percent increase in lifespan can also be measured. Thus, these models provide suitable primary efficacy assays for screening systemically administered ribozymes/ribozyme formulations.

[0345] In the Lewis lung and B-16 melanoma models, systemic pharmacotherapy with a wide variety of agents usually begins 1-7 days following tumor implantation/inoculation with either continuous or multiple administration regimens. Concurrent pharmacokinetic studies can be performed to determine whether sufficient tissue levels of ribozymes can be achieved for pharmacodynamic effect to be expected. Furthermore, primary tumors and secondary lung metastases can be removed and subjected to a variety of in vitro studies (i.e. target RNA reduction).

[0346] Flt-1, KDR and/or flk-1 protein levels can be measured clinically or experimentally by FACS analysis. Flt-1, KDR and/or flk-1 encoded mRNA levels can be assessed by Northern analysis, RNase-protection, primer extension analysis and/or quantitative RT-PCR. Ribozymes that block flt-1, KDR and/or flk-1 protein encoding mRNAs and therefore result in decreased levels of flt-1, KDR and/or flk-1 activity by more than 20% in vitro can be identified.

[0347] Ribozymes and/or genes encoding them are delivered by either free delivery, liposome delivery, cationic lipid delivery, adeno-associated virus vector delivery, adenovirus vector delivery, retrovirus vector delivery or plasmid vector delivery in these animal model experiments (see above).

[0348] Subjects can be treated by locally administering nucleic acids targeted against VEGF-R by direct injection. Routes of administration include, but are not limited to, intravascular, intramuscular, subcutaneous, intraarticular, aerosol inhalation, oral (tablet, capsule or pill form), topical, systemic, ocular, intraperitoneal and/or intrathecal delivery.

[0349] Surgically induced models of endometriosis have been developed in rats, mice, and rabbits. Non-human primates demonstrate spontaneous endometriosis, but surgical induction can also be used. In addition to the surgical technique, cycle monitoring can be performed by daily vaginal cytology in primates. For all of the surgically induced models of endometriosis, the following general procedure is used. An initial laparotomy is performed to implant tissue from a donor animal. A portion of one uterine horn (or one complete horn in the case of mice) is removed. The endometrium of this piece of uterus is separated from the myometrium and cut into small segments (4-10 mm2). Segments (approximately 3) are sutured to various locations within the abdominal cavity (peritoneum, intestinal mesentery vessels, uterus, broad ligament). Cummings and Metcalf (1996) attached whole segments of mouse uterus without separating the endometrium from the myometrium. Implants are allowed to grow for 3-6 weeks. A second laparotomy is sometimes performed to verify development of endometriosis-like foci (vascularization and cysts filled with clear fluid). This second laparotomy was done in the studies by Quereda et al., (1996) and Stoeckemann et al., (1995). After 3-6 weeks post-surgery and/or following visualization of endometriosis, drug treatment is initiated and continued for a prescribed period of time. At the termination of these studies, animals are euthanized. Endpoints include, but are not limited to, changes in the surface area of the implants and tissue mass of the ectopic endometrial implants (see for example Brogniez et al., 1995, Human Reprod. 10, 927-931; Cummings et al., 1996, Tox. Appl. Pharm. 138, 131-139; Cummings and Metcalf, 1996, Proc. Soc. Exp. Biol. Med. 212, 332-337; D'Hooghe et al., 1996, Fertility and Sterility. 66, 809-813; Quereda et al., 1996, Eur. J. Obstet. Gynecol. Rep. Biol. 67, 35-40; and Stoeckemann et al., 1995, Human Reprod. 10, 3264-3271).

[0350] Combination Therapies

[0351] Gemcytabine and cyclophosphamide are non-limiting examples of chemotherapeutic agents that can be combined with or used in conjunction with the nucleic acid molecules (e.g. ribozymes and antisense molecules) of the instant invention. Those skilled in the art will recognize that other anti-angiogenic and/or anti-cancer compounds and therapies can be similarly be readily combined with the nucleic acid molecules of the instant invention (e.g. ribozymes and antisense molecules) and are hence within the scope of the instant invention. Such compounds and therapies are well known in the art (see for example Cancer: Principles and Pranctice of Oncology, Volumes 1 and 2, eds Devita, V. T., Hellman, S., and Rosenberg, S. A., J. B. Lippincott Company, Philadelphia, USA; incorporated herein by reference) and include, without limitations, folates, antifolates, pyrimidine analogs, fluoropyrimidines, purine analogs, adenosine analogs, topoisomerase I inhibitors, anthrapyrazoles, retinoids, antibiotics, anthacyclins, platinum analogs, alkylating agents, nitrosoureas, plant derived compounds such as vinca alkaloids, epipodophyllotoxins, tyrosine kinase inhibitors, taxols, radiation therapy, surgery, nutritional supplements, gene therapy, radiotherapy, for example 3D-CRT, immunotoxin therapy, for example ricin, and monoclonal antibodies. Specific examples of chemotherapeutic compounds than can be combined with or used in conjuction with the nucleic acid molecules of the invention include but are not limited to Paclitaxel; Docetaxel; Methotrexate; Doxorubin; Edatrexate; Vinorelbine; Tomaxifen; Leucovorin; 5-fluoro uridine (5-FU); Irinotecan (CAMPTOSA® or CPT-11 or Camptothecin-11 or Campto); Cisplatin; Carboplatin; Amsacrine; Cytarabine; Bleomycin; Mitomycin C; Dactinomycin; Mithramycin; Hexamethylmelamine; Dacarbazine; L-asperginase; Nitrogen mustard; Melphalan, Chlorambucil; Busulfan; Ifosfamide; 4-hydroperoxycyclophosphamide, Thiotepa; Tamoxifen, Herceptin; IMC C225; ABX-EGF: and combinations thereof.

[0352] Diagnostic Uses

[0353] The nucleic acid molecules of this invention (e.g., enzymatic nucleic acid molecules) can be used as diagnostic tools to examine genetic drift and mutations within diseased cells or to detect the presence of VEGF and/or VEGFr, such as VEGFR1 and/or VEGFR2 RNA in a cell. The close relationship between enzymatic nucleic acid molecule activity and the structure of the target RNA allows the detection of mutations in any region of the molecule which alters the base-pairing and three-dimensional structure of the target RNA. By using multiple enzymatic nucleic acid molecules described in this invention, one can map nucleotide changes which are important to RNA structure and function in vitro, as well as in cells and tissues. Cleavage of target RNAs with enzymatic nucleic acid molecules can be used to inhibit gene expression and define the role (essentially) of specified gene products in the progression of disease. In this manner, other genetic targets can be defined as important mediators of the disease. These experiments can lead to better treatment of the disease progression by affording the possibility of combinational therapies (e.g., multiple enzymatic nucleic acid molecules targeted to different genes, enzymatic nucleic acid molecules coupled with known small molecule inhibitors, or intermittent treatment with combinations of enzymatic nucleic acid molecules and/or other chemical or biological molecules). Other in vitro uses of enzymatic nucleic acid molecules of this invention are well known in the art, and include detection of the presence of mRNAs associated with VEGF, VEGFRL and/or VEGFR2-related condition. Such RNA is detected by determining the presence of a cleavage product after treatment with an enzymatic nucleic acid molecule using standard methodology.

[0354] In a specific example, enzymatic nucleic acid molecules which cleave only wild-type or mutant forms of the target RNA are used for the assay. The first enzymatic nucleic acid molecule is used to identify wild-type RNA present in the sample and the second enzymatic nucleic acid molecule is used to identify mutant RNA in the sample. As reaction controls, synthetic substrates of both wild-type and mutant RNA are cleaved by both enzymatic nucleic acid molecules to demonstrate the relative enzymatic nucleic acid molecule efficiencies in the reactions and the absence of cleavage of the “non-targeted” RNA species. The cleavage products from the synthetic substrates also serve to generate size markers for the analysis of wild-type and mutant RNAs in the sample population. Thus each analysis requires two enzymatic nucleic acid molecules, two substrates and one unknown sample which is combined into six reactions. The presence of cleavage products is determined using an RNAse protection assay so that full-length and cleavage fragments of each RNA can be analyzed in one lane of a polyacrylamide gel. It is not absolutely required to quantify the results to gain insight into the expression of mutant RNAs and putative risk of the desired phenotypic changes in target cells. The expression of mRNA whose protein product is implicated in the development of the phenotype (i.e., VEGFR1 and/or VEGFR2) is adequate to establish risk. If probes of comparable specific activity are used for both transcripts, then a qualitative comparison of RNA levels will be adequate and will decrease the cost of the initial diagnosis. Higher mutant form to wild-type ratios are correlated with higher risk whether RNA levels are compared qualitatively or quantitatively. The use of enzymatic nucleic acid molecules in diagnostic applications contemplated by the instant invention is described, for example, in Usman et al., U.S. patent application Ser. No. 09/877,526, George et al., U.S. Pat. Nos. 5,834,186 and 5,741,679, Shih et al., U.S. Pat. No. 5,589,332, Nathan et al., U.S. Pat. No. 5,871,914, Nathan and Ellington, International PCT publication No. WO 00/24931, Breaker et al., International PCT Publication Nos. WO 00/26226 and 98/27104, and Sullenger et al., U.S. patent application Ser. No. 09/205,520.

[0355] Additional Uses

[0356] Uses of sequence-specific enzymatic nucleic acid molecules of the instant invention can have many of the same applications for the study of RNA that DNA restriction endonucleases have for the study of DNA (Nathans et al., 1975 Ann. Rev. Biochem. 44:273). For example, the pattern of restriction fragments can be used to establish sequence relationships between two related RNAs, and large RNAs can be specifically cleaved to fragments of a size more useful for study. The ability to engineer sequence specificity of the enzymatic nucleic acid molecule is ideal for cleavage of RNAs of unknown sequence. Applicant has described the use of nucleic acid molecules to down-regulate gene expression of target genes in bacterial, microbial, fungal, viral, and eukaryotic systems including plant, or mammalian cells.

[0357] All patents and publications mentioned in the specification are indicative of the levels of skill of those skilled in the art to which the invention pertains. All references cited in this disclosure are incorporated by reference to the same extent as if each reference had been incorporated by reference in its entirety individually.

[0358] One skilled in the art would readily appreciate that the present invention is well adapted to carry out the objects and obtain the ends and advantages mentioned, as well as those inherent therein. The methods and compositions described herein as presently representative of preferred embodiments are exemplary and are not intended as limitations on the scope of the invention. Changes therein and other uses will occur to those skilled in the art, which are encompassed within the spirit of the invention, are defined by the scope of the claims.

[0359] It will be readily apparent to one skilled in the art that varying substitutions and modifications may be made to the invention disclosed herein without departing from the scope and spirit of the invention. Thus, such additional embodiments are within the scope of the present invention and the following claims.

[0360] The invention illustratively described herein suitably may be practiced in the absence of any element or elements, limitation or limitations which is not specifically disclosed herein. Thus, for example, in each instance herein any of the terms “comprising”, “consisting essentially of” and “consisting of” may be replaced with either of the other two terms. The terms and expressions which have been employed are used as terms of description and not of limitation, and there is no intention that in the use of such terms and expressions of excluding any equivalents of the features shown and described or portions thereof, but it is recognized that various modifications are possible within the scope of the invention claimed. Thus, it should be understood that although the present invention has been specifically disclosed by preferred embodiments, optional features, modification and variation of the concepts herein disclosed may be resorted to by those skilled in the art, and that such modifications and variations are considered to be within the scope of this invention as defined by the description and the appended claims.

[0361] In addition, where features or aspects of the invention are described in terms of Markush groups or other grouping of alternatives, those skilled in the art will recognize that the invention is also thereby described in terms of any individual member or subgroup of members of the Markush group or other group.

[0362] Other embodiments are within the following claims.

The application's sequence listing, which the Patent Office published only in electronic form, follows.

SEQUENCE LISTING (5989 sequences)

SEQ ID NO: 1 - RNA, 17 nt, Homo Sapiens
uccucucggcuccuccc

SEQ ID NO: 2 - RNA, 17 nt, Homo Sapiens
ccuccccggcagcggcg

SEQ ID NO: 3 - RNA, 17 nt, Homo Sapiens
ccccggcagcggcggcg

SEQ ID NO: 4 - RNA, 17 nt, Homo Sapiens
cggcagcggcggcggcu

SEQ ID NO: 5 - RNA, 17 nt, Homo Sapiens
cagcggcggcggcucgg

SEQ ID NO: 6 - RNA, 17 nt, Homo Sapiens
cggcggcggcucggagc

SEQ ID NO: 7 - RNA, 17 nt, Homo Sapiens
ggcucggagcgggcucc

SEQ ID NO: 8 - RNA, 17 nt, Homo Sapiens
cggagcgggcuccgggg

SEQ ID NO: 9 - RNA, 17 nt, Homo Sapiens
gcuccggggcucgggug

SEQ ID NO: 10 - RNA, 17 nt, Homo Sapiens
gggcucgggugcagcgg

SEQ ID NO: 11 - RNA, 17 nt, Homo Sapiens
gcucgggugcagcggcc

SEQ ID NO: 12 - RNA, 17 nt, Homo Sapiens
cgggugcagcggccagc

SEQ ID NO: 13 - RNA, 17 nt, Homo Sapiens
gugcagcggccagcggg

SEQ ID NO: 14 - RNA, 17 nt, Homo Sapiens
agcggccagcgggccug

SEQ ID NO: 15 - RNA, 17 nt, Homo Sapiens
gccagcgggccuggcgg

SEQ ID NO: 16 - RNA, 17 nt, Homo Sapiens
cgggccuggcggcgagg

SEQ ID NO: 17 - RNA, 17 nt, Homo Sapiens
gccuggcggcgaggauu

SEQ ID NO: 18 - RNA, 17 nt, Homo Sapiens
cggcgaggauuacccgg

SEQ ID NO: 19 - RNA, 17 nt, Homo Sapiens
cgaggauuacccgggga

SEQ ID NO: 20 - RNA, 17 nt, Homo Sapiens
ccggggaagugguuguc

SEQ ID NO: 21 - RNA, 17 nt, Homo Sapiens
gggaagugguugucucc

SEQ ID NO: 22 - RNA, 17 nt, Homo Sapiens
aagugguugucuccugg

SEQ ID NO: 23 - RNA, 17 nt, Homo Sapiens
gucuccuggcuggagcc

SEQ ID NO: 24 - RNA, 17 nt, Homo Sapiens
uggcuggagccgcgaga

SEQ ID NO: 25 - RNA, 17 nt, Homo Sapiens
cuggagccgcgagacgg

SEQ ID NO: 26 - RNA, 17 nt, Homo Sapiens
gccgcgagacgggcgcu

SEQ ID NO: 27 - RNA, 17 nt, Homo Sapiens
cgagacgggcgcucagg

SEQ ID NO: 28 - RNA, 17 nt, Homo Sapiens
agacgggcgcucagggc

SEQ ID NO: 29 - RNA, 17 nt, Homo Sapiens
cgcucagggcgcggggc

SEQ ID NO: 30 - RNA, 17 nt, Homo Sapiens
cucagggcgcggggccg

SEQ ID NO: 31 - RNA, 17 nt, Homo Sapiens
ggcgcggggccggcggc

SEQ ID NO: 32 - RNA, 17 nt, Homo Sapiens
cggggccggcggcggcg

SEQ ID NO: 33 - RNA, 17 nt, Homo Sapiens
ggccggcggcggcgaac

SEQ ID NO: 34 - RNA, 17 nt, Homo Sapiens
cggcggcggcgaacgag

SEQ ID NO: 35 - RNA, 17 nt, Homo Sapiens
ggcggcgaacgagagga

SEQ ID NO: 36 - RNA, 17 nt, Homo Sapiens
acgagaggacggacucu

SEQ ID NO: 37 - RNA, 17 nt, Homo Sapiens
gaggacggacucuggcg

SEQ ID NO: 38 - RNA, 17 nt, Homo Sapiens
ggacucuggcggccggg

SEQ ID NO: 39 - RNA, 17 nt, Homo Sapiens
cucuggcggccgggucg

SEQ ID NO: 40 - RNA, 17 nt, Homo Sapiens
gcggccgggucguuggc

SEQ ID NO: 41 - RNA, 17 nt, Homo Sapiens
gccgggucguuggccgg

SEQ ID NO: 42 - RNA, 17 nt, Homo Sapiens
ggucguuggccggggga

SEQ ID NO: 43 - RNA, 17 nt, Homo Sapiens
ccgggggagcgcgggca

SEQ ID NO: 44 - RNA, 17 nt, Homo Sapiens
gggggagcgcgggcacc

SEQ ID NO: 45 - RNA, 17 nt, Homo Sapiens
gagcgcgggcaccgggc

SEQ ID NO: 46 - RNA, 17 nt, Homo Sapiens
gcgcgggcaccgggcga

SEQ ID NO: 47 - RNA, 17 nt, Homo Sapiens
ggcaccgggcgagcagg

SEQ ID NO: 48 - RNA, 17 nt, Homo Sapiens
ccgggcgagcaggccgc

SEQ ID NO: 49 - RNA, 17 nt, Homo Sapiens
gcgagcaggccgcgucg

SEQ ID NO: 50 - RNA, 17 nt, Homo Sapiens
agcaggccgcgucgcgc

SEQ ID NO: 51 - RNA, 17 nt, Homo Sapiens
caggccgcgucgcgcuc

SEQ ID NO: 52 - RNA, 17 nt, Homo Sapiens
gccgcgucgcgcucacc

SEQ ID NO: 53 - RNA, 17 nt, Homo Sapiens
cgcgucgcgcucaccau

SEQ ID NO: 54 - RNA, 17 nt, Homo Sapiens
ucgcgcucaccaugguc

SEQ ID NO: 55 - RNA, 17 nt, Homo Sapiens
cgcucaccauggucagc

SEQ ID NO: 56 - RNA, 17 nt, Homo Sapiens
ucaccauggucagcuac

SEQ ID NO: 57 - RNA, 17 nt, Homo Sapiens
cauggucagcuacuggg

SEQ ID NO: 58 - RNA, 17 nt, Homo Sapiens
ggucagcuacugggaca

SEQ ID NO: 59 - RNA, 17 nt, Homo Sapiens
cuacugggacaccgggg

SEQ ID NO: 60 - RNA, 17 nt, Homo Sapiens
acugggacaccgggguc

SEQ ID NO: 61 - RNA, 17 nt, Homo Sapiens
acaccgggguccugcug

SEQ ID NO: 62 - RNA, 17 nt, Homo Sapiens
gggguccugcugugcgc

SEQ ID NO: 63 - RNA, 17 nt, Homo Sapiens
guccugcugugcgcgcu

SEQ ID NO: 64 - RNA, 17 nt, Homo Sapiens
ccugcugugcgcgcugc

SEQ ID NO: 65 - RNA, 17 nt, Homo Sapiens
ugcugugcgcgcugcuc

SEQ ID NO: 66 - RNA, 17 nt, Homo Sapiens
cugugcgcgcugcucag

SEQ ID NO: 67 - RNA, 17 nt, Homo Sapiens
ugcgcgcugcucagcug

SEQ ID NO: 68 - RNA, 17 nt, Homo Sapiens
gcugcucagcugucugc

SEQ ID NO: 69 - RNA, 17 nt, Homo Sapiens
gcucagcugucugcuuc

SEQ ID NO: 70 - RNA, 17 nt, Homo Sapiens
agcugucugcuucucac

SEQ ID NO: 71 - RNA, 17 nt, Homo Sapiens
ugcuucucacaggaucu

SEQ ID NO: 72 - RNA, 17 nt, Homo Sapiens
cucacaggaucuaguuc

SEQ ID NO: 73 - RNA, 17 nt, Homo Sapiens
aggaucuaguucagguu

SEQ ID NO: 74 - RNA, 17 nt, Homo Sapiens
uaguucagguucaaaau

SEQ ID NO: 75 - RNA, 17 nt, Homo Sapiens
gguucaaaauuaaaaga

SEQ ID NO: 76 - RNA, 17 nt, Homo Sapiens
auuaaaagauccugaac

SEQ ID NO: 77 - RNA, 17 nt, Homo Sapiens
gauccugaacugaguuu

SEQ ID NO: 78 - RNA, 17 nt, Homo Sapiens
ugaacugaguuuaaaag

SEQ ID NO: 79 - RNA, 17 nt, Homo Sapiens
uuuaaaaggcacccagc

SEQ ID NO: 80 - RNA, 17 nt, Homo Sapiens
uaaaaggcacccagcac

SEQ ID NO: 81 - RNA, 17 nt, Homo Sapiens
ggcacccagcacaucau

SEQ ID NO: 82 - RNA, 17 nt, Homo Sapiens
cacccagcacaucaugc

SEQ ID NO: 83 - RNA, 17 nt, Homo Sapiens
cccagcacaucaugcaa

SEQ ID NO: 84 - RNA, 17 nt, Homo Sapiens
agcacaucaugcaagca

SEQ ID NO: 85 - RNA, 17 nt, Homo Sapiens
cacaucaugcaagcagg

SEQ ID NO: 86 - RNA, 17 nt, Homo Sapiens
ucaugcaagcaggccag

SEQ ID NO: 87 - RNA, 17 nt, Homo Sapiens
gcaagcaggccagacac

SEQ ID NO: 88 - RNA, 17 nt, Homo Sapiens
caggccagacacugcau

SEQ ID NO: 89 - RNA, 17 nt, Homo Sapiens
ggccagacacugcaucu

SEQ ID NO: 90 - RNA, 17 nt, Homo Sapiens
cagacacugcaucucca

SEQ ID NO: 91 - RNA, 17 nt, Homo Sapiens
gacacugcaucuccaau

SEQ ID NO: 92 - RNA, 17 nt, Homo Sapiens
caucuccaaugcagggg

SEQ ID NO: 93 - RNA, 17 nt, Homo Sapiens
ucuccaaugcagggggg

SEQ ID NO: 94 - RNA, 17 nt, Homo Sapiens
ggggggaagcagcccau

SEQ ID NO: 95 - RNA, 17 nt, Homo Sapiens
gggaagcagcccauaaa

SEQ ID NO: 96 - RNA, 17 nt, Homo Sapiens
agcagcccauaaauggu

SEQ ID NO: 97 - RNA, 17 nt, Homo Sapiens
gcccauaaauggucuuu

SEQ ID NO: 98 - RNA, 17 nt, Homo Sapiens
cauaaauggucuuugcc

SEQ ID NO: 99 - RNA, 17 nt, Homo Sapiens
uggucuuugccugaaau

SEQ ID NO: 100 - RNA, 17 nt, Homo Sapiens
ugccugaaauggugagu

SEQ ID NO: 101 - RNA, 17 nt, Homo Sapiens
cugaaauggugaguaag

SEQ ID NO: 102 - RNA, 17 nt, Homo Sapiens
aauggugaguaaggaaa

SEQ ID NO: 103 - RNA, 17 nt, Homo Sapiens
uaaggaaagcgaaaggc

SEQ ID NO: 104 - RNA, 17 nt, Homo Sapiens
agcgaaaggcugagcau

SEQ ID NO: 105 - RNA, 17 nt, Homo Sapiens
aaggcugagcauaacua

SEQ ID NO: 106 - RNA, 17 nt, Homo Sapiens
ggcugagcauaacuaaa

SEQ ID NO: 107 - RNA, 17 nt, Homo Sapiens
ugagcauaacuaaaucu

SEQ ID NO: 108 - RNA, 17 nt, Homo Sapiens
auaacuaaaucugccug

SEQ ID NO: 109 - RNA, 17 nt, Homo Sapiens
cuaaaucugccugugga

SEQ ID NO: 110 - RNA, 17 nt, Homo Sapiens
aucugccuguggaagaa

SEQ ID NO: 111 - RNA, 17 nt, Homo Sapiens
uggaagaaauggcaaac

SEQ ID NO: 112 - RNA, 17 nt, Homo Sapiens
aagaaauggcaaacaau

SEQ ID NO: 113 - RNA, 17 nt, Homo Sapiens
aauggcaaacaauucug

SEQ ID NO: 114 - RNA, 17 nt, Homo Sapiens
ggcaaacaauucugcag

SEQ ID NO: 115 - RNA, 17 nt, Homo Sapiens
acaauucugcaguacuu

SEQ ID NO: 116 - RNA, 17 nt, Homo Sapiens
auucugcaguacuuuaa

SEQ ID NO: 117 - RNA, 17 nt, Homo Sapiens
ucugcaguacuuuaacc

SEQ ID NO: 118 - RNA, 17 nt, Homo Sapiens
guacuuuaaccuugaac

SEQ ID NO: 119 - RNA, 17 nt, Homo Sapiens
aaccuugaacacagcuc

SEQ ID NO: 120 - RNA, 17 nt, Homo Sapiens
ccuugaacacagcucaa

SEQ ID NO: 121 - RNA, 17 nt, Homo Sapiens
ugaacacagcucaagca

SEQ ID NO: 122 - RNA, 17 nt, Homo Sapiens
cagcucaagcaaaccac

SEQ ID NO: 123 - RNA, 17 nt, Homo Sapiens
ucaagcaaaccacacug

SEQ ID NO: 124 - RNA, 17 nt, Homo Sapiens
agcaaaccacacuggcu

SEQ ID NO: 125 - RNA, 17 nt, Homo Sapiens
caaaccacacuggcuuc

SEQ ID NO: 126 - RNA, 17 nt, Homo Sapiens
ccacacuggcuucuaca

SEQ ID NO: 127 - RNA, 17 nt, Homo Sapiens
uggcuucuacagcugca

SEQ ID NO: 128 - RNA, 17 nt, Homo Sapiens
cuucuacagcugcaaau

SEQ ID NO: 129 - RNA, 17 nt, Homo Sapiens
cuacagcugcaaauauc

SEQ ID NO: 130 - RNA, 17 nt, Homo Sapiens
agcugcaaauaucuagc

SEQ ID NO: 131 - RNA, 17 nt, Homo Sapiens
cugcaaauaucuagcug

SEQ ID NO: 132 - RNA, 17 nt, Homo Sapiens
aauaucuagcuguaccu

SEQ ID NO: 133 - RNA, 17 nt, Homo Sapiens
aucuagcuguaccuacu

SEQ ID NO: 134 - RNA, 17 nt, Homo Sapiens
cuagcuguaccuacuuc

SEQ ID NO: 135 - RNA, 17 nt, Homo Sapiens
cuguaccuacuucaaag

SEQ ID NO: 136 - RNA, 17 nt, Homo Sapiens
agaaggaaacagaaucu

SEQ ID NO: 137 - RNA, 17 nt, Homo Sapiens
gaaacagaaucugcaau

SEQ ID NO: 138 - RNA, 17 nt, Homo Sapiens
cagaaucugcaaucuau

SEQ ID NO: 139 - RNA, 17 nt, Homo Sapiens
aaucugcaaucuauaua

SEQ ID NO: 140 - RNA, 17 nt, Homo Sapiens
ugcaaucuauauauuua

SEQ ID NO: 141 - RNA, 17 nt, Homo Sapiens
caaucuauauauuuauu

SEQ ID NO: 142 - RNA, 17 nt, Homo Sapiens
aucuauauauuuauuag

SEQ ID NO: 143 - RNA, 17 nt, Homo Sapiens
auauauuuauuagugau

SEQ ID NO: 144 - RNA, 17 nt, Homo Sapiens
auuuauuagugauacag

SEQ ID NO: 145 - RNA, 17 nt, Homo Sapiens
uauuagugauacaggua

SEQ ID NO: 146 - RNA, 17 nt, Homo Sapiens
uuagugauacagguaga

SEQ ID NO: 147 - RNA, 17 nt, Homo Sapiens
ugauacagguagaccuu

SEQ ID NO: 148 - RNA, 17 nt, Homo Sapiens
acagguagaccuuucgu

SEQ ID NO: 149 - RNA, 17 nt, Homo Sapiens
gaccuuucguagagaug

SEQ ID NO: 150 - RNA, 17 nt, Homo Sapiens
ucguagagauguacagu

SEQ ID NO: 151 - RNA, 17 nt, Homo Sapiens
guagagauguacaguga

SEQ ID NO: 152 - RNA, 17 nt, Homo Sapiens
agagauguacagugaaa

SEQ ID NO: 153 - RNA, 17 nt, Homo Sapiens
gauguacagugaaaucc

SEQ ID NO: 154 - RNA, 17 nt, Homo Sapiens
acagugaaauccccgaa

SEQ ID NO: 155 - RNA, 17 nt, Homo Sapiens
uccccgaaauuauacac

SEQ ID NO: 156 - RNA, 17 nt, Homo Sapiens
ccgaaauuauacacaug

SEQ ID NO: 157 - RNA, 17 nt, Homo Sapiens
gaaauuauacacaugac

SEQ ID NO: 158 - RNA, 17 nt, Homo Sapiens
aauuauacacaugacug

SEQ ID NO: 159 - RNA, 17 nt, Homo Sapiens
uuauacacaugacugaa

SEQ ID NO: 160 - RNA, 17 nt, Homo Sapiens
uacacaugacugaagga

SEQ ID NO: 161 - RNA, 17 nt, Homo Sapiens
ggaagggagcucgucau

SEQ ID NO: 162 - RNA, 17 nt, Homo Sapiens
gggagcucgucauuccc

SEQ ID NO: 163 - RNA, 17 nt, Homo Sapiens
agcucgucauucccugc

SEQ ID NO: 164 - RNA, 17 nt, Homo Sapiens
cauucccugccggguua

SEQ ID NO: 165 - RNA, 17 nt, Homo Sapiens
ccugccggguuacguca

SEQ ID NO: 166 - RNA, 17 nt, Homo Sapiens
gccggguuacgucaccu

SEQ ID NO: 167 - RNA, 17 nt, Homo Sapiens
cggguuacgucaccuaa

SEQ ID NO: 168 - RNA, 17 nt, Homo Sapiens
guuacgucaccuaacau

SEQ ID NO: 169 - RNA, 17 nt, Homo Sapiens
gucaccuaacaucacug

SEQ ID NO: 170 - RNA, 17 nt, Homo Sapiens
caccuaacaucacuguu

SEQ ID NO: 171 - RNA, 17 nt, Homo Sapiens
cuaacaucacuguuacu

SEQ ID NO: 172 - RNA, 17 nt, Homo Sapiens
acaucacuguuacuuua

SEQ ID NO: 173 - RNA, 17 nt, Homo Sapiens
ucacuguuacuuuaaaa

SEQ ID NO: 174 - RNA, 17 nt, Homo Sapiens
uuaaaaaaguuuccacu

SEQ ID NO: 175 - RNA, 17 nt, Homo Sapiens
aaguuuccacuugacac

SEQ ID NO: 176 - RNA, 17 nt, Homo Sapiens
uccacuugacacuuuga

SEQ ID NO: 177 - RNA, 17 nt, Homo Sapiens
cacuugacacuuugauc

SEQ ID NO: 178 - RNA, 17 nt, Homo Sapiens
acacuuugaucccugau

SEQ ID NO: 179 - RNA, 17 nt, Homo Sapiens
gaucccugauggaaaac

SEQ ID NO: 180 - RNA, 17 nt, Homo Sapiens
gauggaaaacgcauaau

SEQ ID NO: 181 - RNA, 17 nt, Homo Sapiens
uggaaaacgcauaaucu

SEQ ID NO: 182 - RNA, 17 nt, Homo Sapiens
gaaaacgcauaaucugg

SEQ ID NO: 183 - RNA, 17 nt, Homo Sapiens
aacgcauaaucugggac

SEQ ID NO: 184 - RNA, 17 nt, Homo Sapiens
aaucugggacaguagaa

SEQ ID NO: 185 - RNA, 17 nt, Homo Sapiens
cugggacaguagaaagg

SEQ ID NO: 186 - RNA, 17 nt, Homo Sapiens
uagaaagggcuucauca

SEQ ID NO: 187 - RNA, 17 nt, Homo Sapiens
agggcuucaucauauca

SEQ ID NO: 188 - RNA, 17 nt, Homo Sapiens
gcuucaucauaucaaau

SEQ ID NO: 189 - RNA, 17 nt, Homo Sapiens
uucaucauaucaaaugc

SEQ ID NO: 190 - RNA, 17 nt, Homo Sapiens
cauaucaaaugcaacgu

SEQ ID NO: 191 - RNA, 17 nt, Homo Sapiens
uaucaaaugcaacguac

SEQ ID NO: 192 - RNA, 17 nt, Homo Sapiens
caaaugcaacguacaaa

SEQ ID NO: 193 - RNA, 17 nt, Homo Sapiens
aaugcaacguacaaaga

SEQ ID NO: 194 - RNA, 17 nt, Homo Sapiens
ugcaacguacaaagaaa

SEQ ID NO: 195 - RNA, 17 nt, Homo Sapiens
acaaagaaauagggcuu

SEQ ID NO: 196 - RNA, 17 nt, Homo Sapiens
gaaauagggcuucugac

SEQ ID NO: 197 - RNA, 17 nt, Homo Sapiens
ggcuucugaccugugaa

SEQ ID NO: 198 - RNA, 17 nt, Homo Sapiens
ucugaccugugaagcaa

SEQ ID NO: 199 - RNA, 17 nt, Homo Sapiens
ccugugaagcaacaguc

SEQ ID NO: 200 - RNA, 17 nt, Homo Sapiens
gugaagcaacagucaau

SEQ ID NO: 201 - RNA, 17 nt, Homo Sapiens
aagcaacagucaauggg

SEQ ID NO: 202 - RNA, 17 nt, Homo Sapiens
aacagucaaugggcauu

SEQ ID NO: 203 - RNA, 17 nt, Homo Sapiens
gucaaugggcauuugua

SEQ ID NO: 204 - RNA, 17 nt, Homo Sapiens
caaugggcauuuguaua

SEQ ID NO: 205 - RNA, 17 nt, Homo Sapiens
gggcauuuguauaagac

SEQ ID NO: 206 - RNA, 17 nt, Homo Sapiens
gcauuuguauaagacaa

SEQ ID NO: 207 - RNA, 17 nt, Homo Sapiens
uguauaagacaaacuau

SEQ ID NO: 208 - RNA, 17 nt, Homo Sapiens
uaagacaaacuaucuca

SEQ ID NO: 209 - RNA, 17 nt, Homo Sapiens
gacaaacuaucucacac

SEQ ID NO: 210 - RNA, 17 nt, Homo Sapiens
acuaucucacacaucga

SEQ ID NO: 211 - RNA, 17 nt, Homo Sapiens
uaucucacacaucgaca

SEQ ID NO: 212 - RNA, 17 nt, Homo Sapiens
ucucacacaucgacaaa

SEQ ID NO: 213 - RNA, 17 nt, Homo Sapiens
acacaucgacaaaccaa

SEQ ID NO: 214 - RNA, 17 nt, Homo Sapiens
aucgacaaaccaauaca

SEQ ID NO: 215 - RNA, 17 nt, Homo Sapiens
acaaaccaauacaauca

SEQ ID NO: 216 - RNA, 17 nt, Homo Sapiens
aaaccaauacaaucaua

SEQ ID NO: 217 - RNA, 17 nt, Homo Sapiens
ccaauacaaucauagau

SEQ ID NO: 218 - RNA, 17 nt, Homo Sapiens
auacaaucauagauguc

SEQ ID NO: 219 - RNA, 17 nt, Homo Sapiens
aaucauagauguccaaa

SEQ ID NO: 220 - RNA, 17 nt, Homo Sapiens
ucauagauguccaaaua

SEQ ID NO: 221 - RNA, 17 nt, Homo Sapiens
auguccaaauaagcaca

SEQ ID NO: 222 - RNA, 17 nt, Homo Sapiens
ccaaauaagcacaccac

SEQ ID NO: 223 - RNA, 17 nt, Homo Sapiens
aaauaagcacaccacgc

SEQ ID NO: 224 - RNA, 17 nt, Homo Sapiens
auaagcacaccacgccc

SEQ ID NO: 225 - RNA, 17 nt, Homo Sapiens
agcacaccacgcccagu

SEQ ID NO: 226 - RNA, 17 nt, Homo Sapiens
cacaccacgcccaguca

SEQ ID NO: 227 - RNA, 17 nt, Homo Sapiens
cacgcccagucaaauua

SEQ ID NO: 228 - RNA, 17 nt, Homo Sapiens
ccagucaaauuacuuag

SEQ ID NO: 229 - RNA, 17 nt, Homo Sapiens
gucaaauuacuuagagg

SEQ ID NO: 230 - RNA, 17 nt, Homo Sapiens
acuuagaggccauacuc

SEQ ID NO: 231 - RNA, 17 nt, Homo Sapiens
uagaggccauacucuug

SEQ ID NO: 232 - RNA, 17 nt, Homo Sapiens
gaggccauacucuuguc

SEQ ID NO: 233 - RNA, 17 nt, Homo Sapiens
auacucuuguccucaau

SEQ ID NO: 234 - RNA, 17 nt, Homo Sapiens
uguccucaauuguacug

SEQ ID NO: 235 - RNA, 17 nt, Homo Sapiens
ccucaauuguacugcua

SEQ ID NO: 236 - RNA, 17 nt, Homo Sapiens
ucaauuguacugcuacc

SEQ ID NO: 237 - RNA, 17 nt, Homo Sapiens
auuguacugcuaccacu

SEQ ID NO: 238 - RNA, 17 nt, Homo Sapiens
guacugcuaccacuccc

SEQ ID NO: 239 - RNA, 17 nt, Homo Sapiens
cugcuaccacucccuug

SEQ ID NO: 240 - RNA, 17 nt, Homo Sapiens
ucccuugaacacgagag

SEQ ID NO: 241 - RNA, 17 nt, Homo Sapiens
ccuugaacacgagaguu

SEQ ID NO: 242 - RNA, 17 nt, Homo Sapiens
acacgagaguucaaaug

SEQ ID NO: 243 - RNA, 17 nt, Homo Sapiens
gaguucaaaugaccugg

SEQ ID NO: 244 - RNA, 17 nt, Homo Sapiens
uucaaaugaccuggagu

SEQ ID NO: 245 - RNA, 17 nt, Homo Sapiens
gaccuggaguuacccug

SEQ ID NO: 246 - RNA, 17 nt, Homo Sapiens
cuggaguuacccugaug

SEQ ID NO: 247 - RNA, 17 nt, Homo Sapiens
uuacccugaugaaaaaa

SEQ ID NO: 248 - RNA, 17 nt, Homo Sapiens
ugaaaaaaauaagagag

SEQ ID NO: 249 - RNA, 17 nt, Homo Sapiens
auaagagagcuuccgua

SEQ ID NO: 250 - RNA, 17 nt, Homo Sapiens
gagcuuccguaaggcga

SEQ ID NO: 251 - RNA, 17 nt, Homo Sapiens
uccguaaggcgacgaau

SEQ ID NO: 252 - RNA, 17 nt, Homo Sapiens
guaaggcgacgaauuga

SEQ ID NO: 253 - RNA, 17 nt, Homo Sapiens
ggcgacgaauugaccaa

SEQ ID NO: 254 - RNA, 17 nt, Homo Sapiens
acgaauugaccaaagca

SEQ ID NO: 255 - RNA, 17 nt, Homo Sapiens
ugaccaaagcaauuccc

SEQ ID NO: 256 - RNA, 17 nt, Homo Sapiens
ccaaagcaauucccaug

SEQ ID NO: 257 - RNA, 17 nt, Homo Sapiens
caauucccaugccaaca

SEQ ID NO: 258 - RNA, 17 nt, Homo Sapiens
auucccaugccaacaua

SEQ ID NO: 259 - RNA, 17 nt, Homo Sapiens
ccaugccaacauauucu

SEQ ID NO: 260 - RNA, 17 nt, Homo Sapiens
augccaacauauucuac

SEQ ID NO: 261 - RNA, 17 nt, Homo Sapiens
gccaacauauucuacag

SEQ ID NO: 262 - RNA, 17 nt, Homo Sapiens
cauauucuacaguguuc

SEQ ID NO: 263 - RNA, 17 nt, Homo Sapiens
auucuacaguguucuua

SEQ ID NO: 264 - RNA, 17 nt, Homo Sapiens
ucuacaguguucuuacu

SEQ ID NO: 265 - RNA, 17 nt, Homo Sapiens
guguucuuacuauugac

SEQ ID NO: 266 - RNA, 17 nt, Homo Sapiens
uucuuacuauugacaaa

SEQ ID NO: 267 - RNA, 17 nt, Homo Sapiens
uacuauugacaaaaugc

SEQ ID NO: 268 - RNA, 17 nt, Homo Sapiens
uugacaaaaugcagaac

SEQ ID NO: 269 - RNA, 17 nt, Homo Sapiens
gacaaaaugcagaacaa

SEQ ID NO: 270 - RNA, 17 nt, Homo Sapiens
aaugcagaacaaagaca

SEQ ID NO: 271 - RNA, 17 nt, Homo Sapiens
gaacaaagacaaaggac

SEQ ID NO: 272 - RNA, 17 nt, Homo Sapiens
gacaaaggacuuuauac

SEQ ID NO: 273 - RNA, 17 nt, Homo Sapiens
aggacuuuauacuuguc

SEQ ID NO: 274 - RNA, 17 nt, Homo Sapiens
gacuuuauacuugucgu

SEQ ID NO: 275 - RNA, 17 nt, Homo Sapiens
uuauacuugucguguaa

SEQ ID NO: 276 - RNA, 17 nt, Homo Sapiens
uacuugucguguaagga

SEQ ID NO: 277 - RNA, 17 nt, Homo Sapiens
cuugucguguaaggagu

SEQ ID NO: 278 - RNA, 17 nt, Homo Sapiens
uguaaggaguggaccau

SEQ ID NO: 279 - RNA, 17 nt, Homo Sapiens
aggaguggaccaucauu

SEQ ID NO: 280 - RNA, 17 nt, Homo Sapiens
aguggaccaucauucaa

SEQ ID NO: 281 - RNA, 17 nt, Homo Sapiens
ggaccaucauucaaauc

SEQ ID NO: 282 - RNA, 17 nt, Homo Sapiens
ucauucaaaucuguuaa

SEQ ID NO: 283 - RNA, 17 nt, Homo Sapiens
ucaaaucuguuaacacc

SEQ ID NO: 284 - RNA, 17 nt, Homo Sapiens
aucuguuaacaccucag

SEQ ID NO: 285 - RNA, 17 nt, Homo Sapiens
cuguuaacaccucagug

SEQ ID NO: 286 - RNA, 17 nt, Homo Sapiens
acaccucagugcauaua

SEQ ID NO: 287 - RNA, 17 nt, Homo Sapiens
accucagugcauauaua

SEQ ID NO: 288 - RNA, 17 nt, Homo Sapiens
cucagugcauauauaug

SEQ ID NO: 289 - RNA, 17 nt, Homo Sapiens
cagugcauauauaugau

SEQ ID NO: 290 - RNA, 17 nt, Homo Sapiens
gugcauauauaugauaa

SEQ ID NO: 291 - RNA, 17 nt, Homo Sapiens
gcauauauaugauaaag

SEQ ID NO: 292 - RNA, 17 nt, Homo Sapiens
uauauaugauaaagcau

SEQ ID NO: 293 - RNA, 17 nt, Homo Sapiens
augauaaagcauucauc

SEQ ID NO: 294 - RNA, 17 nt, Homo Sapiens
gauaaagcauucaucac

SEQ ID NO: 295 - RNA, 17 nt, Homo Sapiens
aagcauucaucacugug

SEQ ID NO: 296 - RNA, 17 nt, Homo Sapiens
cauucaucacugugaaa

SEQ ID NO: 297 - RNA, 17 nt, Homo Sapiens
ucaucacugugaaacau

SEQ ID NO: 298 - RNA, 17 nt, Homo Sapiens
acugugaaacaucgaaa

SEQ ID NO: 299 - RNA, 17 nt, Homo Sapiens
ugugaaacaucgaaaac

SEQ ID NO: 300 - RNA, 17 nt, Homo Sapiens
caucgaaaacagcaggu

SEQ ID NO: 301 - RNA, 17 nt, Homo Sapiens
cgaaaacagcaggugcu

SEQ ID NO: 302 - RNA, 17 nt, Homo Sapiens
aacagcaggugcuugaa

SEQ ID NO: 303 - RNA, 17 nt, Homo Sapiens
cagcaggugcuugaaac

SEQ ID NO: 304 - RNA, 17 nt, Homo Sapiens
ugcuugaaaccguagcu

SEQ ID NO: 305 - RNA, 17 nt, Homo Sapiens
uugaaaccguagcuggc

SEQ ID NO: 306 - RNA, 17 nt, Homo Sapiens
aaaccguagcuggcaag

SEQ ID NO: 307 - RNA, 17 nt, Homo Sapiens
cguagcuggcaagcggu

SEQ ID NO: 308 - RNA, 17 nt, Homo Sapiens
gcuggcaagcggucuua

SEQ ID NO: 309 - RNA, 17 nt, Homo Sapiens
ggcaagcggucuuaccg

SEQ ID NO: 310 - RNA, 17 nt, Homo Sapiens
gcggucuuaccggcucu

SEQ ID NO: 311 - RNA, 17 nt, Homo Sapiens
ucuuaccggcucucuau

SEQ ID NO: 312 - RNA, 17 nt, Homo Sapiens
ggcucucuaugaaagug

SEQ ID NO: 313 - RNA, 17 nt, Homo Sapiens
cuaugaaagugaaggca

SEQ ID NO: 314 - RNA, 17 nt, Homo Sapiens
aagugaaggcauuuccc

SEQ ID NO: 315 - RNA, 17 nt, Homo Sapiens
gugaaggcauuucccuc

SEQ ID NO: 316 - RNA, 17 nt, Homo Sapiens
uuucccucgccggaagu

SEQ ID NO: 317 - RNA, 17 nt, Homo Sapiens
cgccggaaguuguaugg

SEQ ID NO: 318 - RNA, 17 nt, Homo Sapiens
cggaaguuguaugguua

SEQ ID NO: 319 - RNA, 17 nt, Homo Sapiens
gaaguuguaugguuaaa

SEQ ID NO: 320 - RNA, 17 nt, Homo Sapiens
guuguaugguuaaaaga

SEQ ID NO: 321 - RNA, 17 nt, Homo Sapiens
guuaaaagauggguuac

SEQ ID NO: 322 - RNA, 17 nt, Homo Sapiens
aaagauggguuaccugc

SEQ ID NO: 323 - RNA, 17 nt, Homo Sapiens
gauggguuaccugcgac

SEQ ID NO: 324 - RNA, 17 nt, Homo Sapiens
gguuaccugcgacugag

SEQ ID NO: 325 - RNA, 17 nt, Homo Sapiens
uaccugcgacugagaaa

SEQ ID NO: 326 - RNA, 17 nt, Homo Sapiens
acugagaaaucugcucg

SEQ ID NO: 327 - RNA, 17 nt, Homo Sapiens
agaaaucugcucgcuau

SEQ ID NO: 328 - RNA, 17 nt, Homo Sapiens
aucugcucgcuauuuga

SEQ ID NO: 329 - RNA, 17 nt, Homo Sapiens
ugcucgcuauuugacuc

SEQ ID NO: 330 - RNA, 17 nt, Homo Sapiens
gcuauuugacucguggc

SEQ ID NO: 331 - RNA, 17 nt, Homo Sapiens
uuugacucguggcuacu

SEQ ID NO: 332 - RNA, 17 nt, Homo Sapiens
gacucguggcuacucgu

SEQ ID NO: 333 - RNA, 17 nt, Homo Sapiens
ucguggcuacucguuaa

SEQ ID NO: 334 - RNA, 17 nt, Homo Sapiens
ggcuacucguuaauuau

SEQ ID NO: 335 - RNA, 17 nt, Homo Sapiens
acucguuaauuaucaag

SEQ ID NO: 336 - RNA, 17 nt, Homo Sapiens
cguuaauuaucaaggac

SEQ ID NO: 337 - RNA, 17 nt, Homo Sapiens
uaucaaggacguaacug

SEQ ID NO: 338 - RNA, 17 nt, Homo Sapiens
ucaaggacguaacugaa

SEQ ID NO: 339 - RNA, 17 nt, Homo Sapiens
aggacguaacugaagag

SEQ ID NO: 340 - RNA, 17 nt, Homo Sapiens
ugaagaggaugcaggga

SEQ ID NO: 341 - RNA, 17 nt, Homo Sapiens
aagaggaugcagggaau

SEQ ID NO: 342 - RNA, 17 nt, Homo Sapiens
ugcagggaauuauacaa

SEQ ID NO: 343 - RNA, 17 nt, Homo Sapiens
agggaauuauacaaucu

SEQ ID NO: 344 - RNA, 17 nt, Homo Sapiens
ggaauuauacaaucuug

SEQ ID NO: 345 - RNA, 17 nt, Homo Sapiens
auuauacaaucuugcug

SEQ ID NO: 346 - RNA, 17 nt, Homo Sapiens
acaaucuugcugagcau

SEQ ID NO: 347 - RNA, 17 nt, Homo Sapiens
cuugcugagcauaaaac

SEQ ID NO: 348 - RNA, 17 nt, Homo Sapiens
ugcugagcauaaaacag

SEQ ID NO: 349 - RNA, 17 nt, Homo Sapiens
agcauaaaacagucaaa

SEQ ID NO: 350 - RNA, 17 nt, Homo Sapiens
auaaaacagucaaaugu

SEQ ID NO: 351 - RNA, 17 nt, Homo Sapiens
acagucaaauguguuua

SEQ ID NO: 352 - RNA, 17 nt, Homo Sapiens
agucaaauguguuuaaa

SEQ ID NO: 353 - RNA, 17 nt, Homo Sapiens
ucaaauguguuuaaaaa

SEQ ID NO: 354 - RNA, 17 nt, Homo Sapiens
guuuaaaaaccucacug

SEQ ID NO: 355 - RNA, 17 nt, Homo Sapiens
aaaaccucacugccacu

SEQ ID NO: 356 - RNA, 17 nt, Homo Sapiens
accucacugccacucua

SEQ ID NO: 357 - RNA, 17 nt, Homo Sapiens
ucacugccacucuaauu

SEQ ID NO: 358 - RNA, 17 nt, Homo Sapiens
ccacucuaauugucaau

SEQ ID NO: 359 - RNA, 17 nt, Homo Sapiens
cucuaauugucaaugug

SEQ ID NO: 360 - RNA, 17 nt, Homo Sapiens
aauugucaaugugaaac

SEQ ID NO: 361 - RNA, 17 nt, Homo Sapiens
uugucaaugugaaaccc

SEQ ID NO: 362 - RNA, 17 nt, Homo Sapiens
aaugugaaaccccagau

SEQ ID NO: 363 - RNA, 17 nt, Homo Sapiens
aaccccagauuuacgaa

SEQ ID NO: 364 - RNA, 17 nt, Homo Sapiens
ccagauuuacgaaaagg

SEQ ID NO: 365 - RNA, 17 nt, Homo Sapiens
acgaaaaggccguguca

SEQ ID NO: 366 - RNA, 17 nt, Homo Sapiens
aaaaggccgugucaucg

SEQ ID NO: 367 - RNA, 17 nt, Homo Sapiens
aaggccgugucaucguu

SEQ ID NO: 368 - RNA, 17 nt, Homo Sapiens
gccgugucaucguuucc

SEQ ID NO: 369 - RNA, 17 nt, Homo Sapiens
gugucaucguuuccaga

SEQ ID NO: 370 - RNA, 17 nt, Homo Sapiens
guuuccagacccggcuc

SEQ ID NO: 371 - RNA, 17 nt, Homo Sapiens
cagacccggcucucuac

SEQ ID NO: 372 - RNA, 17 nt, Homo Sapiens
ggcucucuacccacugg

SEQ ID NO: 373 - RNA, 17 nt, Homo Sapiens
cucuacccacugggcag

SEQ ID NO: 374 - RNA, 17 nt, Homo Sapiens
cccacugggcagcagac

SEQ ID NO: 375 - RNA, 17 nt, Homo Sapiens
acugggcagcagacaaa

SEQ ID NO: 376 - RNA, 17 nt, Homo Sapiens
ggcagcagacaaauccu

SEQ ID NO: 377 - RNA, 17 nt, Homo Sapiens
gcagacaaauccugacu

SEQ ID NO: 378 - RNA, 17 nt, Homo Sapiens
aaauccugacuuguacc

SEQ ID NO: 379 - RNA, 17 nt, Homo Sapiens
ccugacuuguaccgcau

SEQ ID NO: 380 - RNA, 17 nt, Homo Sapiens
ugacuuguaccgcauau

SEQ ID NO: 381 - RNA, 17 nt, Homo Sapiens
cuuguaccgcauauggu

SEQ ID NO: 382 - RNA, 17 nt, Homo Sapiens
uguaccgcauaugguau

SEQ ID NO: 383 - RNA, 17 nt, Homo Sapiens
uaccgcauaugguaucc

SEQ ID NO: 384 - RNA, 17 nt, Homo Sapiens
cgcauaugguaucccuc

SEQ ID NO: 385 - RNA, 17 nt, Homo Sapiens
cauaugguaucccucaa

SEQ ID NO: 386 - RNA, 17 nt, Homo Sapiens
aucccucaaccuacaau

SEQ ID NO: 387 - RNA, 17 nt, Homo Sapiens
cucaaccuacaaucaag

SEQ ID NO: 388 - RNA, 17 nt, Homo Sapiens
aaccuacaaucaagugg

SEQ ID NO: 389 - RNA, 17 nt, Homo Sapiens
acaaucaagugguucug

SEQ ID NO: 390 - RNA, 17 nt, Homo Sapiens
aucaagugguucuggca

SEQ ID NO: 391 - RNA, 17 nt, Homo Sapiens
ugguucuggcaccccug

SEQ ID NO: 392 - RNA, 17 nt, Homo Sapiens
guucuggcaccccugua

SEQ ID NO: 393 - RNA, 17 nt, Homo Sapiens
gcaccccuguaaccaua

SEQ ID NO: 394 - RNA, 17 nt, Homo Sapiens
ccccuguaaccauaauc

SEQ ID NO: 395 - RNA, 17 nt, Homo Sapiens
cuguaaccauaaucauu

SEQ ID NO: 396 - RNA, 17 nt, Homo Sapiens
uaaccauaaucauuccg

SEQ ID NO: 397 - RNA, 17 nt, Homo Sapiens
ccauaaucauuccgaag

SEQ ID NO: 398 - RNA, 17 nt, Homo Sapiens
auuccgaagcaaggugu

SEQ ID NO: 399 - RNA, 17 nt, Homo Sapiens
gaagcaaggugugacuu

SEQ ID NO: 400 - RNA, 17 nt, Homo Sapiens
agcaaggugugacuuuu

SEQ ID NO: 401 - RNA, 17 nt, Homo Sapiens
aaggugugacuuuuguu

SEQ ID NO: 402 - RNA, 17 nt, Homo Sapiens
ugacuuuuguuccaaua

SEQ ID NO: 403 - RNA, 17 nt, Homo Sapiens
uuguuccaauaaugaag

SEQ ID NO: 404 - RNA, 17 nt, Homo Sapiens
uuccaauaaugaagagu

SEQ ID NO: 405 - RNA, 17 nt, Homo Sapiens
aaugaagaguccuuuau

SEQ ID NO: 406 - RNA, 17 nt, Homo Sapiens
aguccuuuauccuggau

SEQ ID NO: 407 - RNA, 17 nt, Homo Sapiens
uauccuggaugcugaca

SEQ ID NO: 408 - RNA, 17 nt, Homo Sapiens
uccuggaugcugacagc

SEQ ID NO: 409 - RNA, 17 nt, Homo Sapiens
ggaugcugacagcaaca

SEQ ID NO: 410 - RNA, 17 nt, Homo Sapiens
ugcugacagcaacaugg

SEQ ID NO: 411 - RNA, 17 nt, Homo Sapiens
ugacagcaacaugggaa

SEQ ID NO: 412 - RNA, 17 nt, Homo Sapiens
acagcaacaugggaaac

SEQ ID NO: 413 - RNA, 17 nt, Homo Sapiens
caugggaaacagaauug

SEQ ID NO: 414 - RNA, 17 nt, Homo Sapiens
gaaacagaauugagagc

SEQ ID NO: 415 - RNA, 17 nt, Homo Sapiens
aauugagagcaucacuc

SEQ ID NO: 416 - RNA, 17 nt, Homo Sapiens
uugagagcaucacucag

SEQ ID NO: 417 - RNA, 17 nt, Homo Sapiens
agagcaucacucagcgc

SEQ ID NO: 418 - RNA, 17 nt, Homo Sapiens
aucacucagcgcauggc

SEQ ID NO: 419 - RNA, 17 nt, Homo Sapiens
cacucagcgcauggcaa

SEQ ID NO: 420 - RNA, 17 nt, Homo Sapiens
cucagcgcauggcaaua

SEQ ID NO: 421 - RNA, 17 nt, Homo Sapiens
agcgcauggcaauaaua

SEQ ID NO: 422 - RNA, 17 nt, Homo Sapiens
gcauggcaauaauagaa

SEQ ID NO: 423 - RNA, 17 nt, Homo Sapiens
uggcaauaauagaagga

SEQ ID NO: 424 - RNA, 17 nt, Homo Sapiens
aggaaagaauaagaugg

SEQ ID NO: 425 - RNA, 17 nt, Homo Sapiens
agaauaagauggcuagc

SEQ ID NO: 426 - RNA, 17 nt, Homo Sapiens
auaagauggcuagcacc

SEQ ID NO: 427 - RNA, 17 nt, Homo Sapiens
gauggcuagcaccuugg

SEQ ID NO: 428 - RNA, 17 nt, Homo Sapiens
uggcuagcaccuugguu

SEQ ID NO: 429 - RNA, 17 nt, Homo Sapiens
gcaccuugguuguggcu

SEQ ID NO: 430 - RNA, 17 nt, Homo Sapiens
ccuugguuguggcugac

SEQ ID NO: 431 - RNA, 17 nt, Homo Sapiens
ugguuguggcugacucu

SEQ ID NO: 432 - RNA, 17 nt, Homo Sapiens
uguggcugacucuagaa

SEQ ID NO: 433 - RNA, 17 nt, Homo Sapiens
acucuagaauuucugga

SEQ ID NO: 434 - RNA, 17 nt, Homo Sapiens
uuucuggaaucuacauu

SEQ ID NO: 435 - RNA, 17 nt, Homo Sapiens
uggaaucuacauuugca

SEQ ID NO: 436 - RNA, 17 nt, Homo Sapiens
gaaucuacauuugcaua

SEQ ID NO: 437 - RNA, 17 nt, Homo Sapiens
cuacauuugcauagcuu

SEQ ID NO: 438 - RNA, 17 nt, Homo Sapiens
acauuugcauagcuucc

SEQ ID NO: 439 - RNA, 17 nt, Homo Sapiens
uuugcauagcuuccaau

SEQ ID NO: 440 - RNA, 17 nt, Homo Sapiens
agcuuccaauaaaguug

SEQ ID NO: 441 - RNA, 17 nt, Homo Sapiens
ccaauaaaguugggacu

SEQ ID NO: 442 - RNA, 17 nt, Homo Sapiens
aaguugggacuguggga

SEQ ID NO: 443 - RNA, 17 nt, Homo Sapiens
uugggacugugggaaga

SEQ ID NO: 444 - RNA, 17 nt, Homo Sapiens
gggaagaaacauaagcu

SEQ ID NO: 445 - RNA, 17 nt, Homo Sapiens
gaagaaacauaagcuuu

SEQ ID NO: 446 - RNA, 17 nt, Homo Sapiens
aaacauaagcuuuuaua

SEQ ID NO: 447 - RNA, 17 nt, Homo Sapiens
aagcuuuuauaucacag

SEQ ID NO: 448 - RNA, 17 nt, Homo Sapiens
gcuuuuauaucacagau

SEQ ID NO: 449 - RNA, 17 nt, Homo Sapiens
uuuauaucacagaugug

SEQ ID NO: 450 - RNA, 17 nt, Homo Sapiens
uaucacagaugugccaa

SEQ ID NO: 451 - RNA, 17 nt, Homo Sapiens
ucacagaugugccaaau

SEQ ID NO: 452 - RNA, 17 nt, Homo Sapiens
acagaugugccaaaugg

SEQ ID NO: 453 - RNA, 17 nt, Homo Sapiens
ugugccaaauggguuuc

SEQ ID NO: 454 - RNA, 17 nt, Homo Sapiens
ccaaauggguuucaugu

SEQ ID NO: 455 - RNA, 17 nt, Homo Sapiens
uggguuucauguuaacu

SEQ ID NO: 456 - RNA, 17 nt, Homo Sapiens
gguuucauguuaacuug

SEQ ID NO: 457 - RNA, 17 nt, Homo Sapiens
ucauguuaacuuggaaa

SEQ ID NO: 458 - RNA, 17 nt, Homo Sapiens
uggaaaaaaugccgacg

SEQ ID NO: 459 - RNA, 17 nt, Homo Sapiens
gaaaaaaugccgacgga

SEQ ID NO: 460 - RNA, 17 nt, Homo Sapiens
aaaugccgacggaagga

SEQ ID NO: 461 - RNA, 17 nt, Homo Sapiens
aggagaggaccugaaac

SEQ ID NO: 462 - RNA, 17 nt, Homo Sapiens
gaccugaaacugucuug

SEQ ID NO: 463 - RNA, 17 nt, Homo Sapiens
cugaaacugucuugcac

SEQ ID NO: 464 - RNA, 17 nt, Homo Sapiens
acugucuugcacaguua

SEQ ID NO: 465 - RNA, 17 nt, Homo Sapiens
ugucuugcacaguuaac

SEQ ID NO: 466 - RNA, 17 nt, Homo Sapiens
cuugcacaguuaacaag

SEQ ID NO: 467 - RNA, 17 nt, Homo Sapiens
cacaguuaacaaguucu

SEQ ID NO: 468 - RNA, 17 nt, Homo Sapiens
guuaacaaguucuuaua

SEQ ID NO: 469 - RNA, 17 nt, Homo Sapiens
aaguucuuauacagaga

SEQ ID NO: 470 - RNA, 17 nt, Homo Sapiens
guucuuauacagagacg

SEQ ID NO: 471 - RNA, 17 nt, Homo Sapiens
auacagagacguuacuu

SEQ ID NO: 472 - RNA, 17 nt, Homo Sapiens
acagagacguuacuugg

SEQ ID NO: 473 - RNA, 17 nt, Homo Sapiens
gagacguuacuuggauu

SEQ ID NO: 474 - RNA, 17 nt, Homo Sapiens
uuacuuggauuuuacug

SEQ ID NO: 475 - RNA, 17 nt, Homo Sapiens
uggauuuuacugcggac

SEQ ID NO: 476 - RNA, 17 nt, Homo Sapiens
auuuuacugcggacagu

SEQ ID NO: 477 - RNA, 17 nt, Homo Sapiens
uacugcggacaguuaau

SEQ ID NO: 478 - RNA, 17 nt, Homo Sapiens
ugcggacaguuaauaac

SEQ ID NO: 479 - RNA, 17 nt, Homo Sapiens
gacaguuaauaacagaa

SEQ ID NO: 480 - RNA, 17 nt, Homo Sapiens
aguuaauaacagaacaa

SEQ ID NO: 481 - RNA, 17 nt, Homo Sapiens
auaacagaacaaugcac

SEQ ID NO: 482 - RNA, 17 nt, Homo Sapiens
acagaacaaugcacuac

SEQ ID NO: 483 - RNA, 17 nt, Homo Sapiens
agaacaaugcacuacag

SEQ ID NO: 484 - RNA, 17 nt, Homo Sapiens
aacaaugcacuacagua

SEQ ID NO: 485 - RNA, 17 nt, Homo Sapiens
aaugcacuacaguauua

SEQ ID NO: 486 - RNA, 17 nt, Homo Sapiens
gcacuacaguauuagca

SEQ ID NO: 487 - RNA, 17 nt, Homo Sapiens
acuacaguauuagcaag

SEQ ID NO: 488 - RNA, 17 nt, Homo Sapiens
caguauuagcaagcaaa

SEQ ID NO: 489 - RNA, 17 nt, Homo Sapiens
auuagcaagcaaaaaau

SEQ ID NO: 490 - RNA, 17 nt, Homo Sapiens
agcaaaaaauggccauc

SEQ ID NO: 491 - RNA, 17 nt, Homo Sapiens
aaaaaauggccaucacu

SEQ ID NO: 492 - RNA, 17 nt, Homo Sapiens
aaauggccaucacuaag

SEQ ID NO: 493 - RNA, 17 nt, Homo Sapiens
uggccaucacuaaggag

SEQ ID NO: 494 - RNA, 17 nt, Homo Sapiens
acuaaggagcacuccau

SEQ ID NO: 495 - RNA, 17 nt, Homo Sapiens
uaaggagcacuccauca

SEQ ID NO: 496 - RNA, 17 nt, Homo Sapiens
agcacuccaucacucuu

SEQ ID NO: 497 - RNA, 17 nt, Homo Sapiens
acuccaucacucuuaau

SEQ ID NO: 498 - RNA, 17 nt, Homo Sapiens
cacucuuaaucuuacca

SEQ ID NO: 499 - RNA, 17 nt, Homo Sapiens
uuaaucuuaccaucaug

SEQ ID NO: 500 - RNA, 17 nt, Homo Sapiens
aucuuaccaucaugaau

SEQ ID NO: 501 - RNA, 17 nt, Homo Sapiens
uuaccaucaugaauguu

SEQ ID NO: 502 - RNA, 17 nt, Homo Sapiens
caucaugaauguuuccc

SEQ ID NO: 503 - RNA, 17 nt, Homo Sapiens
ucaugaauguuucccug

SEQ ID NO: 504 - RNA, 17 nt, Homo Sapiens
guuucccugcaagauuc

SEQ ID NO: 505 - RNA, 17 nt, Homo Sapiens
ccugcaagauucaggca

SEQ ID NO: 506 - RNA, 17 nt, Homo Sapiens
agauucaggcaccuaug

SEQ ID NO: 507 - RNA, 17 nt, Homo Sapiens
auucaggcaccuaugcc

SEQ ID NO: 508 - RNA, 17 nt, Homo Sapiens
aggcaccuaugccugca

SEQ ID NO: 509 - RNA, 17 nt, Homo Sapiens
gcaccuaugccugcaga

SEQ ID NO: 510 - RNA, 17 nt, Homo Sapiens
cuaugccugcagagcca

SEQ ID NO: 511 - RNA, 17 nt, Homo Sapiens
ccugcagagccaggaau

SEQ ID NO: 512 - RNA, 17 nt, Homo Sapiens
agccaggaauguauaca

SEQ ID NO: 513 - RNA, 17 nt, Homo Sapiens
ccaggaauguauacaca

SEQ ID NO: 514 - RNA, 17 nt, Homo Sapiens
aggaauguauacacagg

SEQ ID NO: 515 - RNA, 17 nt, Homo Sapiens
gaauguauacacagggg

SEQ ID NO: 516 - RNA, 17 nt, Homo Sapiens
auguauacacaggggaa

SEQ ID NO: 517 - RNA, 17 nt, Homo Sapiens
gggaagaaauccuccag

SEQ ID NO: 518 - RNA, 17 nt, Homo Sapiens
agaaagaaauuacaauc

SEQ ID NO: 519 - RNA, 17 nt, Homo Sapiens
aagaaauuacaaucaga

SEQ ID NO: 520 - RNA, 17 nt, Homo Sapiens
aaauuacaaucagagau

SEQ ID NO: 521 - RNA, 17 nt, Homo Sapiens
aaucagagaucaggaag

SEQ ID NO: 522 - RNA, 17 nt, Homo Sapiens
aucaggaagcaccauac

SEQ ID NO: 523 - RNA, 17 nt, Homo Sapiens
caggaagcaccauaccu

SEQ ID NO: 524 - RNA, 17 nt, Homo Sapiens
gaagcaccauaccuccu

SEQ ID NO: 525 - RNA, 17 nt, Homo Sapiens
agcaccauaccuccugc

SEQ ID NO: 526 - RNA, 17 nt, Homo Sapiens
uaccuccugcgaaaccu

SEQ ID NO: 527 - RNA, 17 nt, Homo Sapiens
ccugcgaaaccucagug

SEQ ID NO: 528 - RNA, 17 nt, Homo Sapiens
aaaccucagugaucaca

SEQ ID NO: 529 - RNA, 17 nt, Homo Sapiens
ccucagugaucacacag

SEQ ID NO: 530 - RNA, 17 nt, Homo Sapiens
cagugaucacacagugg

SEQ ID NO: 531 - RNA, 17 nt, Homo Sapiens
gugaucacacaguggcc

SEQ ID NO: 532 - RNA, 17 nt, Homo Sapiens
aucacacaguggccauc

SEQ ID NO: 533 - RNA, 17 nt, Homo Sapiens
acacaguggccaucagc

SEQ ID NO: 534 - RNA, 17 nt, Homo Sapiens
caguggccaucagcagu

SEQ ID NO: 535 - RNA, 17 nt, Homo Sapiens
ggccaucagcaguucca

SEQ ID NO: 536 - RNA, 17 nt, Homo Sapiens
caucagcaguuccacca

SEQ ID NO: 537 - RNA, 17 nt, Homo Sapiens
gcaguuccaccacuuua

SEQ ID NO: 538 - RNA, 17 nt, Homo Sapiens
guuccaccacuuuagac

SEQ ID NO: 539 - RNA, 17 nt, Homo Sapiens
cacuuuagacugucaug

SEQ ID NO: 540 - RNA, 17 nt, Homo Sapiens
uuuagacugucaugcua

SEQ ID NO: 541 - RNA, 17 nt, Homo Sapiens
agacugucaugcuaaug

SEQ ID NO: 542 - RNA, 17 nt, Homo Sapiens
acugucaugcuaauggu

SEQ ID NO: 543 - RNA, 17 nt, Homo Sapiens
ucaugcuaauggugucc

SEQ ID NO: 544 - RNA, 17 nt, Homo Sapiens
ugcuaaugguguccccg

SEQ ID NO: 545 - RNA, 17 nt, Homo Sapiens
cuaaugguguccccgag

SEQ ID NO: 546 - RNA, 17 nt, Homo Sapiens
guccccgagccucagau

SEQ ID NO: 547 - RNA, 17 nt, Homo Sapiens
agccucagaucacuugg

SEQ ID NO: 548 - RNA, 17 nt, Homo Sapiens
cucagaucacuugguuu

SEQ ID NO: 549 - RNA, 17 nt, Homo Sapiens
aucacuugguuuaaaaa

SEQ ID NO: 550 - RNA, 17 nt, Homo Sapiens
guuuaaaaacaaccaca

SEQ ID NO: 551 - RNA, 17 nt, Homo Sapiens
uaaaaacaaccacaaaa

SEQ ID NO: 552 - RNA, 17 nt, Homo Sapiens
aaacaaccacaaaauac

SEQ ID NO: 553 - RNA, 17 nt, Homo Sapiens
accacaaaauacaacaa

SEQ ID NO: 554 - RNA, 17 nt, Homo Sapiens
cacaaaauacaacaaga

SEQ ID NO: 555 - RNA, 17 nt, Homo Sapiens
aaaauacaacaagagcc

SEQ ID NO: 556 - RNA, 17 nt, Homo Sapiens
caacaagagccuggaau

SEQ ID NO: 557 - RNA, 17 nt, Homo Sapiens
agccuggaauuauuuua

SEQ ID NO: 558 - RNA, 17 nt, Homo Sapiens
cuggaauuauuuuagga

SEQ ID NO: 559 - RNA, 17 nt, Homo Sapiens
auuuuaggaccaggaag

SEQ ID NO: 560 - RNA, 17 nt, Homo Sapiens
accaggaagcagcacgc

SEQ ID NO: 561 - RNA, 17 nt, Homo Sapiens
aggaagcagcacgcugu

SEQ ID NO: 562 - RNA, 17 nt, Homo Sapiens
gaagcagcacgcuguuu

SEQ ID NO: 563 - RNA, 17 nt, Homo Sapiens
agcagcacgcuguuuau

SEQ ID NO: 564 - RNA, 17 nt, Homo Sapiens
agcacgcuguuuauuga

SEQ ID NO: 565 - RNA, 17 nt, Homo Sapiens
cgcuguuuauugaaaga

SEQ ID NO: 566 - RNA, 17 nt, Homo Sapiens
uugaaagagucacagaa

SEQ ID NO: 567 - RNA, 17 nt, Homo Sapiens
aaagagucacagaagag

SEQ ID NO: 568 - RNA, 17 nt, Homo Sapiens
agaagaggaugaaggug

SEQ ID NO: 569 - RNA, 17 nt, Homo Sapiens
ggaugaaggugucuauc

SEQ ID NO: 570 - RNA, 17 nt, Homo Sapiens
augaaggugucuaucac

SEQ ID NO: 571 - RNA, 17 nt, Homo Sapiens
aggugucuaucacugca

SEQ ID NO: 572 - RNA, 17 nt, Homo Sapiens
ugucuaucacugcaaag

SEQ ID NO: 573 - RNA, 17 nt, Homo Sapiens
cuaucacugcaaagcca

SEQ ID NO: 574 - RNA, 17 nt, Homo Sapiens
acugcaaagccaccaac

SEQ ID NO: 575 - RNA, 17 nt, Homo Sapiens
gcaaagccaccaaccag

SEQ ID NO: 576 - RNA, 17 nt, Homo Sapiens
agccaccaaccagaagg

SEQ ID NO: 577 - RNA, 17 nt, Homo Sapiens
ccagaagggcucugugg

SEQ ID NO: 578 - RNA, 17 nt, Homo Sapiens
agggcucuguggaaagu

SEQ ID NO: 579 - RNA, 17 nt, Homo Sapiens
uguggaaaguucagcau

SEQ ID NO: 580 - RNA, 17 nt, Homo Sapiens
aaaguucagcauaccuc

SEQ ID NO: 581 - RNA, 17 nt, Homo Sapiens
aguucagcauaccucac

SEQ ID NO: 582 - RNA, 17 nt, Homo Sapiens
uucagcauaccucacug

SEQ ID NO: 583 - RNA, 17 nt, Homo Sapiens
cauaccucacuguucaa

SEQ ID NO: 584 - RNA, 17 nt, Homo Sapiens
accucacuguucaagga

SEQ ID NO: 585 - RNA, 17 nt, Homo Sapiens
uucaaggaaccucggac

SEQ ID NO: 586 - RNA, 17 nt, Homo Sapiens
aaccucggacaagucua

SEQ ID NO: 587 - RNA, 17 nt, Homo Sapiens
ucggacaagucuaaucu

SEQ ID NO: 588 - RNA, 17 nt, Homo Sapiens
caagucuaaucuggagc

SEQ ID NO: 589 - RNA, 17 nt, Homo Sapiens
aaucuggagcugaucac

SEQ ID NO: 590 - RNA, 17 nt, Homo Sapiens
uggagcugaucacucua

SEQ ID NO: 591 - RNA, 17 nt, Homo Sapiens
agcugaucacucuaaca

SEQ ID NO: 592 - RNA, 17 nt, Homo Sapiens
ucacucuaacaugcacc

SEQ ID NO: 593 - RNA, 17 nt, Homo Sapiens
acucuaacaugcaccug

SEQ ID NO: 594 - RNA, 17 nt, Homo Sapiens
ucuaacaugcaccugug

SEQ ID NO: 595 - RNA, 17 nt, Homo Sapiens
uaacaugcaccugugug

SEQ ID NO: 596 - RNA, 17 nt, Homo Sapiens
augcaccuguguggcug

SEQ ID NO: 597 - RNA, 17 nt, Homo Sapiens
gcaccuguguggcugcg

SEQ ID NO: 598 - RNA, 17 nt, Homo Sapiens
ccuguguggcugcgacu

SEQ ID NO: 599 - RNA, 17 nt, Homo Sapiens
guguggcugcgacucuc

SEQ ID NO: 600 - RNA, 17 nt, Homo Sapiens
uggcugcgacucucuuc

SEQ ID NO: 601 - RNA, 17 nt, Homo Sapiens
cucuucuggcuccuauu

SEQ ID NO: 602 - RNA, 17 nt, Homo Sapiens
uggcuccuauuaacccu

SEQ ID NO: 603 - RNA, 17 nt, Homo Sapiens
uccuauuaacccuccuu

SEQ ID NO: 604 - RNA, 17 nt, Homo Sapiens
cccuccuuauccgaaaa

SEQ ID NO: 605 - RNA, 17 nt, Homo Sapiens
uccgaaaaaugaaaagg

SEQ ID NO: 606 - RNA, 17 nt, Homo Sapiens
augaaaaggucuucuuc

SEQ ID NO: 607 - RNA, 17 nt, Homo Sapiens
cuucugaaauaaagacu

SEQ ID NO: 608 - RNA, 17 nt, Homo Sapiens
aaauaaagacugacuac

SEQ ID NO: 609 - RNA, 17 nt, Homo Sapiens
aaagacugacuaccuau

SEQ ID NO: 610 - RNA, 17 nt, Homo Sapiens
gacugacuaccuaucaa

SEQ ID NO: 611 - RNA, 17 nt, Homo Sapiens
gacuaccuaucaauuau

SEQ ID NO: 612 - RNA, 17 nt, Homo Sapiens
accuaucaauuauaaug

SEQ ID NO: 613 - RNA, 17 nt, Homo Sapiens
uaucaauuauaauggac

SEQ ID NO: 614 - RNA, 17 nt, Homo Sapiens
caauuauaauggaccca

SEQ ID NO: 615 - RNA, 17 nt, Homo Sapiens
uauaauggacccagaug

SEQ ID NO: 616 - RNA, 17 nt, Homo Sapiens
ggacccagaugaaguuc

SEQ ID NO: 617 - RNA, 17 nt, Homo Sapiens
cagaugaaguuccuuug

SEQ ID NO: 618 - RNA, 17 nt, Homo Sapiens
uccuuuggaugagcagu

SEQ ID NO: 619 - RNA, 17 nt, Homo Sapiens
uuggaugagcaguguga

SEQ ID NO: 620 - RNA, 17 nt, Homo Sapiens
gaugagcagugugagcg

SEQ ID NO: 621 - RNA, 17 nt, Homo Sapiens
ugagcagugugagcggc

SEQ ID NO: 622 - RNA, 17 nt, Homo Sapiens
cagugugagcggcuccc

SEQ ID NO: 623 - RNA, 17 nt, Homo Sapiens
ugugagcggcucccuua

SEQ ID NO: 624 - RNA, 17 nt, Homo Sapiens
gcucccuuaugaugcca

SEQ ID NO: 625 - RNA, 17 nt, Homo Sapiens
cccuuaugaugccagca

SEQ ID NO: 626 - RNA, 17 nt, Homo Sapiens
cuuaugaugccagcaag

SEQ ID NO: 627 - RNA, 17 nt, Homo Sapiens
ugaugccagcaaguggg

SEQ ID NO: 628 - RNA, 17 nt, Homo Sapiens
gccagcaagugggaguu

SEQ ID NO: 629 - RNA, 17 nt, Homo Sapiens
aagugggaguuugcccg

SEQ ID NO: 630 - RNA, 17 nt, Homo Sapiens
gggaguuugcccgggag

SEQ ID NO: 631 - RNA, 17 nt, Homo Sapiens
cgggagagacuuaaacu

SEQ ID NO: 632 - RNA, 17 nt, Homo Sapiens
agacuuaaacugggcaa

SEQ ID NO: 633 - RNA, 17 nt, Homo Sapiens
uaaacugggcaaaucac

SEQ ID NO: 634 - RNA, 17 nt, Homo Sapiens
cugggcaaaucacuugg

SEQ ID NO: 635 - RNA, 17 nt, Homo Sapiens
ggcaaaucacuuggaag

SEQ ID NO: 636 - RNA, 17 nt, Homo Sapiens
gaagaggggcuuuugga

SEQ ID NO: 637 - RNA, 17 nt, Homo Sapiens
uuggaaaagugguucaa

SEQ ID NO: 638 - RNA, 17 nt, Homo Sapiens
gaaaagugguucaagca

SEQ ID NO: 639 - RNA, 17 nt, Homo Sapiens
ugguucaagcaucagca

SEQ ID NO: 640 - RNA, 17 nt, Homo Sapiens
guucaagcaucagcauu

SEQ ID NO: 641 - RNA, 17 nt, Homo Sapiens
aagcaucagcauuuggc

SEQ ID NO: 642 - RNA, 17 nt, Homo Sapiens
gcaucagcauuuggcau

SEQ ID NO: 643 - RNA, 17 nt, Homo Sapiens
agcauuuggcauuaaga

SEQ ID NO: 644 - RNA, 17 nt, Homo Sapiens
cauuuggcauuaagaaa

SEQ ID NO: 645 - RNA, 17 nt, Homo Sapiens
auuaagaaaucaccuac

SEQ ID NO: 646 - RNA, 17 nt, Homo Sapiens
aagaaaucaccuacgug

SEQ ID NO: 647 - RNA, 17 nt, Homo Sapiens
aaucaccuacgugccgg

SEQ ID NO: 648 - RNA, 17 nt, Homo Sapiens
ucaccuacgugccggac

SEQ ID NO: 649 - RNA, 17 nt, Homo Sapiens
accuacgugccggacug

SEQ ID NO: 650 - RNA, 17 nt, Homo Sapiens
cgugccggacuguggcu

SEQ ID NO: 651 - RNA, 17 nt, Homo Sapiens
gccggacuguggcugug

SEQ ID NO: 652 - RNA, 17 nt, Homo Sapiens
ggacuguggcugugaaa

SEQ ID NO: 653 - RNA, 17 nt, Homo Sapiens
cuguggcugugaaaaug

SEQ ID NO: 654 - RNA, 17 nt, Homo Sapiens
cugugaaaaugcugaaa

SEQ ID NO: 655 - RNA, 17 nt, Homo Sapiens
gugaaaaugcugaaaga

SEQ ID NO: 656 - RNA, 17 nt, Homo Sapiens
aagagggggccacggcc

SEQ ID NO: 657 - RNA, 17 nt, Homo Sapiens
agggggccacggccagc

SEQ ID NO: 658 - RNA, 17 nt, Homo Sapiens
gggccacggccagcgag

SEQ ID NO: 659 - RNA, 17 nt, Homo Sapiens
cacggccagcgaguaca

SEQ ID NO: 660 - RNA, 17 nt, Homo Sapiens
gccagcgaguacaaagc

SEQ ID NO: 661 - RNA, 17 nt, Homo Sapiens
cagcgaguacaaagcuc

SEQ ID NO: 662 - RNA, 17 nt, Homo Sapiens
aguacaaagcucugaug

SEQ ID NO: 663 - RNA, 17 nt, Homo Sapiens
aagcucugaugacugag

SEQ ID NO: 664 - RNA, 17 nt, Homo Sapiens
cucugaugacugagcua

SEQ ID NO: 665 - RNA, 17 nt, Homo Sapiens
augacugagcuaaaaau

SEQ ID NO: 666 - RNA, 17 nt, Homo Sapiens
agcuaaaaaucuugacc

SEQ ID NO: 667 - RNA, 17 nt, Homo Sapiens
aaaucuugacccacauu

SEQ ID NO: 668 - RNA, 17 nt, Homo Sapiens
cuugacccacauuggcc

SEQ ID NO: 669 - RNA, 17 nt, Homo Sapiens
ugacccacauuggccac

SEQ ID NO: 670 - RNA, 17 nt, Homo Sapiens
ccacauuggccaccauc

SEQ ID NO: 671 - RNA, 17 nt, Homo Sapiens
cauuggccaccaucuga

SEQ ID NO: 672 - RNA, 17 nt, Homo Sapiens
uggccaccaucugaacg

SEQ ID NO: 673 - RNA, 17 nt, Homo Sapiens
ccaucugaacgugguua

SEQ ID NO: 674 - RNA, 17 nt, Homo Sapiens
aucugaacgugguuaac

SEQ ID NO: 675 - RNA, 17 nt, Homo Sapiens
ugaacgugguuaaccug

SEQ ID NO: 676 - RNA, 17 nt, Homo Sapiens
cgugguuaaccugcugg

SEQ ID NO: 677 - RNA, 17 nt, Homo Sapiens
guuaaccugcugggagc

SEQ ID NO: 678 - RNA, 17 nt, Homo Sapiens
ugcugggagccugcacc

SEQ ID NO: 679 - RNA, 17 nt, Homo Sapiens
gggagccugcaccaagc

SEQ ID NO: 680 - RNA, 17 nt, Homo Sapiens
gagccugcaccaagcaa

SEQ ID NO: 681 - RNA, 17 nt, Homo Sapiens
ugcaccaagcaaggagg

SEQ ID NO: 682 - RNA, 17 nt, Homo Sapiens
caaggagggccucugau

SEQ ID NO: 683 - RNA, 17 nt, Homo Sapiens
ggccucugauggugauu

SEQ ID NO: 684 - RNA, 17 nt, Homo Sapiens
cucugauggugauuguu

SEQ ID NO: 685 - RNA, 17 nt, Homo Sapiens
ugauggugauuguugaa

SEQ ID NO: 686 - RNA, 17 nt, Homo Sapiens
uggugauuguugaauac

SEQ ID NO: 687 - RNA, 17 nt, Homo Sapiens
auuguugaauacugcaa

SEQ ID NO: 688 - RNA, 17 nt, Homo Sapiens
uguugaauacugcaaau

SEQ ID NO: 689 - RNA, 17 nt, Homo Sapiens
ugaauacugcaaauaug

SEQ ID NO: 690 - RNA, 17 nt, Homo Sapiens
uacugcaaauauggaaa

SEQ ID NO: 691 - RNA, 17 nt, Homo Sapiens
cugcaaauauggaaauc

SEQ ID NO: 692 - RNA, 17 nt, Homo Sapiens
auauggaaaucucucca

SEQ ID NO: 693 - RNA, 17 nt, Homo Sapiens
ucucuccaacuaccuca

SEQ ID NO: 694 - RNA, 17 nt, Homo Sapiens
cuccaacuaccucaaga

SEQ ID NO: 695 - RNA, 17 nt, Homo Sapiens
ccucaagagcaaacgug

SEQ ID NO: 696 - RNA, 17 nt, Homo Sapiens
aagagcaaacgugacuu

SEQ ID NO: 697 - RNA, 17 nt, Homo Sapiens
gagcaaacgugacuuau

SEQ ID NO: 698 - RNA, 17 nt, Homo Sapiens
caaacgugacuuauuuu

SEQ ID NO: 699 - RNA, 17 nt, Homo Sapiens
cgugacuuauuuuuucu

SEQ ID NO: 700 - RNA, 17 nt, Homo Sapiens
uuuucucaacaaggaug

SEQ ID NO: 701 - RNA, 17 nt, Homo Sapiens
caacaaggaugcagcac

SEQ ID NO: 702 - RNA, 17 nt, Homo Sapiens
acaaggaugcagcacua

SEQ ID NO: 703 - RNA, 17 nt, Homo Sapiens
aggaugcagcacuacac

SEQ ID NO: 704 - RNA, 17 nt, Homo Sapiens
gaugcagcacuacacau

SEQ ID NO: 705 - RNA, 17 nt, Homo Sapiens
gcagcacuacacaugga

SEQ ID NO: 706 - RNA, 17 nt, Homo Sapiens
agcacuacacauggagc

SEQ ID NO: 707 - RNA, 17 nt, Homo Sapiens
cacuacacauggagccu

SEQ ID NO: 708 - RNA, 17 nt, Homo Sapiens
cacauggagccuaagaa

SEQ ID NO: 709 - RNA, 17 nt, Homo Sapiens
aagaaaaaauggagcca

SEQ ID NO: 710 - RNA, 17 nt, Homo Sapiens
aaaauggagccaggccu

SEQ ID NO: 711 - RNA, 17 nt, Homo Sapiens
ggagccaggccuggaac

SEQ ID NO: 712 - RNA, 17 nt, Homo Sapiens
ggccuggaacaaggcaa

SEQ ID NO: 713 - RNA, 17 nt, Homo Sapiens
ggaacaaggcaagaaac

SEQ ID NO: 714 - RNA, 17 nt, Homo Sapiens
ggcaagaaaccaagacu

SEQ ID NO: 715 - RNA, 17 nt, Homo Sapiens
aaaccaagacuagauag

SEQ ID NO: 716 - RNA, 17 nt, Homo Sapiens
aagacuagauagcguca

SEQ ID NO: 717 - RNA, 17 nt, Homo Sapiens
acuagauagcgucacca

SEQ ID NO: 718 - RNA, 17 nt, Homo Sapiens
uagauagcgucaccagc

SEQ ID NO: 719 - RNA, 17 nt, Homo Sapiens
auagcgucaccagcagc

SEQ ID NO: 720 - RNA, 17 nt, Homo Sapiens
cgucaccagcagcgaaa

SEQ ID NO: 721 - RNA, 17 nt, Homo Sapiens
caccagcagcgaaagcu

SEQ ID NO: 722 - RNA, 17 nt, Homo Sapiens
cagcgaaagcuuugcga

SEQ ID NO: 723 - RNA, 17 nt, Homo Sapiens
aaagcuuugcgagcucc

SEQ ID NO: 724 - RNA, 17 nt, Homo Sapiens
cuuugcgagcuccggcu

SEQ ID NO: 725 - RNA, 17 nt, Homo Sapiens
gagcuccggcuuucagg

SEQ ID NO: 726 - RNA, 17 nt, Homo Sapiens
ucaggaagauaaaaguc

SEQ ID NO: 727 - RNA, 17 nt, Homo Sapiens
agauaaaagucugagug

SEQ ID NO: 728 - RNA, 17 nt, Homo Sapiens
aagucugagugauguug

SEQ ID NO: 729 - RNA, 17 nt, Homo Sapiens
ucugagugauguugagg

SEQ ID NO: 730 - RNA, 17 nt, Homo Sapiens
ugagugauguugaggaa

SEQ ID NO: 731 - RNA, 17 nt, Homo Sapiens
agaggaggauucugacg

SEQ ID NO: 732 - RNA, 17 nt, Homo Sapiens
ggauucugacgguuucu

SEQ ID NO: 733 - RNA, 17 nt, Homo Sapiens
uucugacgguuucuaca

SEQ ID NO: 734 - RNA, 17 nt, Homo Sapiens
cgguuucuacaaggagc

SEQ ID NO: 735 - RNA, 17 nt, Homo Sapiens
uacaaggagcccaucac

SEQ ID NO: 736 - RNA, 17 nt, Homo Sapiens
aggagcccaucacuaug

SEQ ID NO: 737 - RNA, 17 nt, Homo Sapiens
agcccaucacuauggaa

SEQ ID NO: 738 - RNA, 17 nt, Homo Sapiens
ccaucacuauggaagau

SEQ ID NO: 739 - RNA, 17 nt, Homo Sapiens
uauggaagaucugauuu

SEQ ID NO: 740 - RNA, 17 nt, Homo Sapiens
aagaucugauuucuuac

SEQ ID NO: 741 - RNA, 17 nt, Homo Sapiens
gauuucuuacaguuuuc

SEQ ID NO: 742 - RNA, 17 nt, Homo Sapiens
uucuuacaguuuucaag

SEQ ID NO: 743 - RNA, 17 nt, Homo Sapiens
guuuucaaguggccaga

SEQ ID NO: 744 - RNA, 17 nt, Homo Sapiens
uucaaguggccagaggc

SEQ ID NO: 745 - RNA, 17 nt, Homo Sapiens
ggccagaggcauggagu

SEQ ID NO: 746 - RNA, 17 nt, Homo Sapiens
ccagaggcauggaguuc

SEQ ID NO: 747 - RNA, 17 nt, Homo Sapiens
ggcauggaguuccuguc

SEQ ID NO: 748 - RNA, 17 nt, Homo Sapiens
gaguuccugucuuccag

SEQ ID NO: 749 - RNA, 17 nt, Homo Sapiens
uccagaaagugcauuca

SEQ ID NO: 750 - RNA, 17 nt, Homo Sapiens
cagaaagugcauucauc

SEQ ID NO: 751 - RNA, 17 nt, Homo Sapiens
gaaagugcauucaucgg

SEQ ID NO: 752 - RNA, 17 nt, Homo Sapiens
gugcauucaucgggacc

SEQ ID NO: 753 - RNA, 17 nt, Homo Sapiens
ucaucgggaccuggcag

SEQ ID NO: 754 - RNA, 17 nt, Homo Sapiens
gggaccuggcagcgaga

SEQ ID NO: 755 - RNA, 17 nt, Homo Sapiens
accuggcagcgagaaac

SEQ ID NO: 756 - RNA, 17 nt, Homo Sapiens
agcgagaaacauucuuu

SEQ ID NO: 757 - RNA, 17 nt, Homo Sapiens
cgagaaacauucuuuua

SEQ ID NO: 758 - RNA, 17 nt, Homo Sapiens
auucuuuuaucugagaa

SEQ ID NO: 759 - RNA, 17 nt, Homo Sapiens
aucugagaacaacgugg

SEQ ID NO: 760 - RNA, 17 nt, Homo Sapiens
ugagaacaacgugguga

SEQ ID NO: 761 - RNA, 17 nt, Homo Sapiens
agaacaacguggugaag

SEQ ID NO: 762 - RNA, 17 nt, Homo Sapiens
acaacguggugaagauu

SEQ ID NO: 763 - RNA, 17 nt, Homo Sapiens
uggugaagauuugugau

SEQ ID NO: 764 - RNA, 17 nt, Homo Sapiens
gaagauuugugauuuug

SEQ ID NO: 765 - RNA, 17 nt, Homo Sapiens
gauuugugauuuuggcc

SEQ ID NO: 766 - RNA, 17 nt, Homo Sapiens
ugauuuuggccuugccc

SEQ ID NO: 767 - RNA, 17 nt, Homo Sapiens
uuggccuugcccgggau

SEQ ID NO: 768 - RNA, 17 nt, Homo Sapiens
ugcccgggauauuuaua

SEQ ID NO: 769 - RNA, 17 nt, Homo Sapiens
cccgggauauuuauaag

SEQ ID NO: 770 - RNA, 17 nt, Homo Sapiens
ggauauuuauaagaacc

SEQ ID NO: 771 - RNA, 17 nt, Homo Sapiens
uuauaagaaccccgauu

SEQ ID NO: 772 - RNA, 17 nt, Homo Sapiens
gaaccccgauuauguga

SEQ ID NO: 773 - RNA, 17 nt, Homo Sapiens
ccccgauuaugugagaa

SEQ ID NO: 774 - RNA, 17 nt, Homo Sapiens
ccgauuaugugagaaaa

SEQ ID NO: 775 - RNA, 17 nt, Homo Sapiens
aaaaggagauacucgac

SEQ ID NO: 776 - RNA, 17 nt, Homo Sapiens
aaggagauacucgacuu

SEQ ID NO: 777 - RNA, 17 nt, Homo Sapiens
gauacucgacuuccucu

SEQ ID NO: 778 - RNA, 17 nt, Homo Sapiens
ccucugaaauggauggc

SEQ ID NO: 779 - RNA, 17 nt, Homo Sapiens
ugaaauggauggcuccc

SEQ ID NO: 780 - RNA, 17 nt, Homo Sapiens
aauggauggcucccgaa

SEQ ID NO: 781 - RNA, 17 nt, Homo Sapiens
gcucccgaaucuaucuu

SEQ ID NO: 782 - RNA, 17 nt, Homo Sapiens
ccgaaucuaucuuugac

SEQ ID NO: 783 - RNA, 17 nt, Homo Sapiens
uaucuuugacaaaaucu

SEQ ID NO: 784 - RNA, 17 nt, Homo Sapiens
uugacaaaaucuacagc

SEQ ID NO: 785 - RNA, 17 nt, Homo Sapiens
caaaaucuacagcacca

SEQ ID NO: 786 - RNA, 17 nt, Homo Sapiens
aaucuacagcaccaaga

SEQ ID NO: 787 - RNA, 17 nt, Homo Sapiens
ucuacagcaccaagagc

SEQ ID NO: 788 - RNA, 17 nt, Homo Sapiens
caccaagagcgacgugu

SEQ ID NO: 789 - RNA, 17 nt, Homo Sapiens
caagagcgacguguggu

SEQ ID NO: 790 - RNA, 17 nt, Homo Sapiens
agagcgacguguggucu

SEQ ID NO: 791 - RNA, 17 nt, Homo Sapiens
agcgacguguggucuua

SEQ ID NO: 792 - RNA, 17 nt, Homo Sapiens
gacguguggucuuacgg

SEQ ID NO: 793 - RNA, 17 nt, Homo Sapiens
guggucuuacggaguau

SEQ ID NO: 794 - RNA, 17 nt, Homo Sapiens
cuuacggaguauugcug

SEQ ID NO: 795 - RNA, 17 nt, Homo Sapiens
uacggaguauugcugug

SEQ ID NO: 796 - RNA, 17 nt, Homo Sapiens
ggaguauugcuguggga

SEQ ID NO: 797 - RNA, 17 nt, Homo Sapiens
guauugcugugggaaau

SEQ ID NO: 798 - RNA, 17 nt, Homo Sapiens
ugugggaaaucuucucc

SEQ ID NO: 799 - RNA, 17 nt, Homo Sapiens
cuccuuaggugggucuc

SEQ ID NO: 800 - RNA, 17 nt, Homo Sapiens
uuaggugggucuccaua

SEQ ID NO: 801 - RNA, 17 nt, Homo Sapiens
gggucuccauacccagg

SEQ ID NO: 802 - RNA, 17 nt, Homo Sapiens
gucuccauacccaggag

SEQ ID NO: 803 - RNA, 17 nt, Homo Sapiens
acccaggaguacaaaug

SEQ ID NO: 804 - RNA, 17 nt, Homo Sapiens
ccaggaguacaaaugga

SEQ ID NO: 805 - RNA, 17 nt, Homo Sapiens
gaguacaaauggaugag

SEQ ID NO: 806 - RNA, 17 nt, Homo Sapiens
acaaauggaugaggacu

SEQ ID NO: 807 - RNA, 17 nt, Homo Sapiens
ggaugaggacuuuugca

SEQ ID NO: 808 - RNA, 17 nt, Homo Sapiens
ggacuuuugcagucgcc

SEQ ID NO: 809 - RNA, 17 nt, Homo Sapiens
cuuuugcagucgccuga

SEQ ID NO: 810 - RNA, 17 nt, Homo Sapiens
uugcagucgccugaggg

SEQ ID NO: 811 - RNA, 17 nt, Homo Sapiens
gagggaaggcaugagga

SEQ ID NO: 812 - RNA, 17 nt, Homo Sapiens
gggaaggcaugaggaug

SEQ ID NO: 813 - RNA, 17 nt, Homo Sapiens
gcaugaggaugagagcu

SEQ ID NO: 814 - RNA, 17 nt, Homo Sapiens
ggaugagagcuccugag

SEQ ID NO: 815 - RNA, 17 nt, Homo Sapiens
gcuccugaguacucuac

SEQ ID NO: 816 - RNA, 17 nt, Homo Sapiens
uccugaguacucuacuc

SEQ ID NO: 817 - RNA, 17 nt, Homo Sapiens
aguacucuacuccugaa

SEQ ID NO: 818 - RNA, 17 nt, Homo Sapiens
cuccugaaaucuaucag

SEQ ID NO: 819 - RNA, 17 nt, Homo Sapiens
ugaaaucuaucagauca

SEQ ID NO: 820 - RNA, 17 nt, Homo Sapiens
ucuaucagaucaugcug

SEQ ID NO: 821 - RNA, 17 nt, Homo Sapiens
aucagaucaugcuggac

SEQ ID NO: 822 - RNA, 17 nt, Homo Sapiens
cagaucaugcuggacug

SEQ ID NO: 823 - RNA, 17 nt, Homo Sapiens
caugcuggacugcuggc

SEQ ID NO: 824 - RNA, 17 nt, Homo Sapiens
gcuggacugcuggcaca

SEQ ID NO: 825 - RNA, 17 nt, Homo Sapiens
gacugcuggcacagaga

SEQ ID NO: 826 - RNA, 17 nt, Homo Sapiens
cugcuggcacagagacc

SEQ ID NO: 827 - RNA, 17 nt, Homo Sapiens
gcacagagacccaaaag

SEQ ID NO: 828 - RNA, 17 nt, Homo Sapiens
aaagaaaggccaagauu

SEQ ID NO: 829 - RNA, 17 nt, Homo Sapiens
aggccaagauuugcaga

SEQ ID NO: 830 - RNA, 17 nt, Homo Sapiens
caagauuugcagaacuu

SEQ ID NO: 831 - RNA, 17 nt, Homo Sapiens
uuugcagaacuugugga

SEQ ID NO: 832 - RNA, 17 nt, Homo Sapiens
cagaacuuguggaaaaa

SEQ ID NO: 833 - RNA, 17 nt, Homo Sapiens
guggaaaaacuagguga

SEQ ID NO: 834 - RNA, 17 nt, Homo Sapiens
aaaacuaggugauuugc

SEQ ID NO: 835 - RNA, 17 nt, Homo Sapiens
acuaggugauuugcuuc

SEQ ID NO: 836 - RNA, 17 nt, Homo Sapiens
ggugauuugcuucaagc

SEQ ID NO: 837 - RNA, 17 nt, Homo Sapiens
ugcuucaagcaaaugua

SEQ ID NO: 838 - RNA, 17 nt, Homo Sapiens
ucaagcaaauguacaac

SEQ ID NO: 839 - RNA, 17 nt, Homo Sapiens
aagcaaauguacaacag

SEQ ID NO: 840 - RNA, 17 nt, Homo Sapiens
gcaaauguacaacagga

SEQ ID NO: 841 - RNA, 17 nt, Homo Sapiens
aauguacaacaggaugg

SEQ ID NO: 842 - RNA, 17 nt, Homo Sapiens
acaacaggaugguaaag

SEQ ID NO: 843 - RNA, 17 nt, Homo Sapiens
acaggaugguaaagacu

SEQ ID NO: 844 - RNA, 17 nt, Homo Sapiens
ugguaaagacuacaucc

SEQ ID NO: 845 - RNA, 17 nt, Homo Sapiens
uaaagacuacaucccaa

SEQ ID NO: 846 - RNA, 17 nt, Homo Sapiens
aagacuacaucccaauc

SEQ ID NO: 847 - RNA, 17 nt, Homo Sapiens
acaucccaaucaaugcc

SEQ ID NO: 848 - RNA, 17 nt, Homo Sapiens
cccaaucaaugccauac

SEQ ID NO: 849 - RNA, 17 nt, Homo Sapiens
caaucaaugccauacug

SEQ ID NO: 850 - RNA, 17 nt, Homo Sapiens
ucaaugccauacugaca

SEQ ID NO: 851 - RNA, 17 nt, Homo Sapiens
aaugccauacugacagg

SEQ ID NO: 852 - RNA, 17 nt, Homo Sapiens
ccauacugacaggaaau

SEQ ID NO: 853 - RNA, 17 nt, Homo Sapiens
gacaggaaauagugggu

SEQ ID NO: 854 - RNA, 17 nt, Homo Sapiens
aggaaauaguggguuua

SEQ ID NO: 855 - RNA, 17 nt, Homo Sapiens
aauaguggguuuacaua

SEQ ID NO: 856 - RNA, 17 nt, Homo Sapiens
guggguuuacauacuca

SEQ ID NO: 857 - RNA, 17 nt, Homo Sapiens
ggguuuacauacucaac

SEQ ID NO: 858 - RNA, 17 nt, Homo Sapiens
guuuacauacucaacuc

SEQ ID NO: 859 - RNA, 17 nt, Homo Sapiens
cauacucaacuccugcc

SEQ ID NO: 860 - RNA, 17 nt, Homo Sapiens
caacuccugccuucucu

SEQ ID NO: 861 - RNA, 17 nt, Homo Sapiens
cucugaggacuucuuca

SEQ ID NO: 862 - RNA, 17 nt, Homo Sapiens
caaggaaaguauuucag

SEQ ID NO: 863 - RNA, 17 nt, Homo Sapiens
aggaaaguauuucagcu

SEQ ID NO: 864 - RNA, 17 nt, Homo Sapiens
guauuucagcuccgaag

SEQ ID NO: 865 - RNA, 17 nt, Homo Sapiens
gcuccgaaguuuaauuc

SEQ ID NO: 866 - RNA, 17 nt, Homo Sapiens
gaaguuuaauucaggaa

SEQ ID NO: 867 - RNA, 17 nt, Homo Sapiens
uucaggaagcucugaug

SEQ ID NO: 868 - RNA, 17 nt, Homo Sapiens
aagcucugaugauguca

SEQ ID NO: 869 - RNA, 17 nt, Homo Sapiens
cucugaugaugucagau

SEQ ID NO: 870 - RNA, 17 nt, Homo Sapiens
cugaugaugucagauau

SEQ ID NO: 871 - RNA, 17 nt, Homo Sapiens
gaugucagauauguaaa

SEQ ID NO: 872 - RNA, 17 nt, Homo Sapiens
ugucagauauguaaaug

SEQ ID NO: 873 - RNA, 17 nt, Homo Sapiens
ucagauauguaaaugcu

SEQ ID NO: 874 - RNA, 17 nt, Homo Sapiens
auauguaaaugcuuuca

SEQ ID NO: 875 - RNA, 17 nt, Homo Sapiens
auguaaaugcuuucaag

SEQ ID NO: 876 - RNA, 17 nt, Homo Sapiens
gcuuucaaguucaugag

SEQ ID NO: 877 - RNA, 17 nt, Homo Sapiens
ucaaguucaugagccug

SEQ ID NO: 878 - RNA, 17 nt, Homo Sapiens
guucaugagccuggaaa

SEQ ID NO: 879 - RNA, 17 nt, Homo Sapiens
uggaaagaaucaaaacc

SEQ ID NO: 880 - RNA, 17 nt, Homo Sapiens
gaaucaaaaccuuugaa

SEQ ID NO: 881 - RNA, 17 nt, Homo Sapiens
uuugaagaacuuuuacc

SEQ ID NO: 882 - RNA, 17 nt, Homo Sapiens
gaacuuuuaccgaaugc

SEQ ID NO: 883 - RNA, 17 nt, Homo Sapiens
uuuaccgaaugccaccu

SEQ ID NO: 884 - RNA, 17 nt, Homo Sapiens
uaccgaaugccaccucc

SEQ ID NO: 885 - RNA, 17 nt, Homo Sapiens
cgaaugccaccuccaug

SEQ ID NO: 886 - RNA, 17 nt, Homo Sapiens
ccaccuccauguuugau

SEQ ID NO: 887 - RNA, 17 nt, Homo Sapiens
accuccauguuugauga

SEQ ID NO: 888 - RNA, 17 nt, Homo Sapiens
cauguuugaugacuacc

SEQ ID NO: 889 - RNA, 17 nt, Homo Sapiens
guuugaugacuaccagg

SEQ ID NO: 890 - RNA, 17 nt, Homo Sapiens
ugaugacuaccagggcg

SEQ ID NO: 891 - RNA, 17 nt, Homo Sapiens
cuaccagggcgacagca

SEQ ID NO: 892 - RNA, 17 nt, Homo Sapiens
ccagggcgacagcagca

SEQ ID NO: 893 - RNA, 17 nt, Homo Sapiens
gggcgacagcagcacuc

SEQ ID NO: 894 - RNA, 17 nt, Homo Sapiens
cgacagcagcacucugu

SEQ ID NO: 895 - RNA, 17 nt, Homo Sapiens
acagcagcacucuguug

SEQ ID NO: 896 - RNA, 17 nt, Homo Sapiens
agcacucuguuggccuc

SEQ ID NO: 897 - RNA, 17 nt, Homo Sapiens
cucuguuggccucuccc

SEQ ID NO: 898 - RNA, 17 nt, Homo Sapiens
ccucucccaugcugaag

SEQ ID NO: 899 - RNA, 17 nt, Homo Sapiens
ucucccaugcugaagcg

SEQ ID NO: 900 - RNA, 17 nt, Homo Sapiens
augcugaagcgcuucac

SEQ ID NO: 901 - RNA, 17 nt, Homo Sapiens
gcugaagcgcuucaccu

SEQ ID NO: 902 - RNA, 17 nt, Homo Sapiens
agcgcuucaccuggacu

SEQ ID NO: 903 - RNA, 17 nt, Homo Sapiens
ucaccuggacugacagc

SEQ ID NO: 904 - RNA, 17 nt, Homo Sapiens
cuggacugacagcaaac

SEQ ID NO: 905 - RNA, 17 nt, Homo Sapiens
gacugacagcaaaccca

SEQ ID NO: 906 - RNA, 17 nt, Homo Sapiens
gacagcaaacccaaggc

SEQ ID NO: 907 - RNA, 17 nt, Homo Sapiens
aacccaaggccucgcuc

SEQ ID NO: 908 - RNA, 17 nt, Homo Sapiens
aaggccucgcucaagau

SEQ ID NO: 909 - RNA, 17 nt, Homo Sapiens
cgcucaagauugacuug

SEQ ID NO: 910 - RNA, 17 nt, Homo Sapiens
caagauugacuugagag

SEQ ID NO: 911 - RNA, 17 nt, Homo Sapiens
acuugagaguaaccagu

SEQ ID NO: 912 - RNA, 17 nt, Homo Sapiens
ugagaguaaccaguaaa

SEQ ID NO: 913 - RNA, 17 nt, Homo Sapiens
aguaaccaguaaaagua

SEQ ID NO: 914 - RNA, 17 nt, Homo Sapiens
caguaaaaguaaggagu

SEQ ID NO: 915 - RNA, 17 nt, Homo Sapiens
aguaaggagucggggcu

SEQ ID NO: 916 - RNA, 17 nt, Homo Sapiens
gagucggggcugucuga

SEQ ID NO: 917 - RNA, 17 nt, Homo Sapiens
ucggggcugucugaugu

SEQ ID NO: 918 - RNA, 17 nt, Homo Sapiens
gcugucugaugucagca

SEQ ID NO: 919 - RNA, 17 nt, Homo Sapiens
ugucugaugucagcagg

SEQ ID NO: 920 - RNA, 17 nt, Homo Sapiens
ugaugucagcaggccca

SEQ ID NO: 921 - RNA, 17 nt, Homo Sapiens
gucagcaggcccaguuu

SEQ ID NO: 922 - RNA, 17 nt, Homo Sapiens
caggcccaguuucugcc

SEQ ID NO: 923 - RNA, 17 nt, Homo Sapiens
caguuucugccauucca

SEQ ID NO: 924 - RNA, 17 nt, Homo Sapiens
uuucugccauuccagcu

SEQ ID NO: 925 - RNA, 17 nt, Homo Sapiens
ccauuccagcugugggc

SEQ ID NO: 926 - RNA, 17 nt, Homo Sapiens
uuccagcugugggcacg

SEQ ID NO: 927 - RNA, 17 nt, Homo Sapiens
agcugugggcacgucag

SEQ ID NO: 928 - RNA, 17 nt, Homo Sapiens
cugugggcacgucagcg

SEQ ID NO: 929 - RNA, 17 nt, Homo Sapiens
gugggcacgucagcgaa

SEQ ID NO: 930 - RNA, 17 nt, Homo Sapiens
gcacgucagcgaaggca

SEQ ID NO: 931 - RNA, 17 nt, Homo Sapiens
cagcgaaggcaagcgca

SEQ ID NO: 932 - RNA, 17 nt, Homo Sapiens
gaaggcaagcgcagguu

SEQ ID NO: 933 - RNA, 17 nt, Homo Sapiens
aggcaagcgcagguuca

SEQ ID NO: 934 - RNA, 17 nt, Homo Sapiens
aagcgcagguucaccua

SEQ ID NO: 935 - RNA, 17 nt, Homo Sapiens
gcagguucaccuacgac

SEQ ID NO: 936 - RNA, 17 nt, Homo Sapiens
guucaccuacgaccacg

SEQ ID NO: 937 - RNA, 17 nt, Homo Sapiens
caccuacgaccacgcug

SEQ ID NO: 938 - RNA, 17 nt, Homo Sapiens
cuacgaccacgcugagc

SEQ ID NO: 939 - RNA, 17 nt, Homo Sapiens
acgaccacgcugagcug

SEQ ID NO: 940 - RNA, 17 nt, Homo Sapiens
cacgcugagcuggaaag

SEQ ID NO: 941 - RNA, 17 nt, Homo Sapiens
aaaggaaaaucgcgugc

SEQ ID NO: 942 - RNA, 17 nt, Homo Sapiens
ggaaaaucgcgugcugc

SEQ ID NO: 943 - RNA, 17 nt, Homo Sapiens
aaaaucgcgugcugcuc

SEQ ID NO: 944 - RNA, 17 nt, Homo Sapiens
aaucgcgugcugcuccc

SEQ ID NO: 945 - RNA, 17 nt, Homo Sapiens
cgcgugcugcuccccgc

SEQ ID NO: 946 - RNA, 17 nt, Homo Sapiens
ugcuccccgcccccaga

SEQ ID NO: 947 - RNA, 17 nt, Homo Sapiens
gcccccagacuacaacu

SEQ ID NO: 948 - RNA, 17 nt, Homo Sapiens
cccagacuacaacucgg

SEQ ID NO: 949 - RNA, 17 nt, Homo Sapiens
agacuacaacucggugg

SEQ ID NO: 950 - RNA, 17 nt, Homo Sapiens
acaacucggugguccug

SEQ ID NO: 951 - RNA, 17 nt, Homo Sapiens
acucggugguccuguac

SEQ ID NO: 952 - RNA, 17 nt, Homo Sapiens
gugguccuguacuccac

SEQ ID NO: 953 - RNA, 17 nt, Homo Sapiens
gguccuguacuccaccc

SEQ ID NO: 954 - RNA, 17 nt, Homo Sapiens
uguacuccaccccaccc

SEQ ID NO: 955 - RNA, 17 nt, Homo Sapiens
uccaccccacccaucua

SEQ ID NO: 956 - RNA, 17 nt, Homo Sapiens
ccccacccaucuagagu

SEQ ID NO: 957 - RNA, 17 nt, Homo Sapiens
caucuagaguuugacac

SEQ ID NO: 958 - RNA, 17 nt, Homo Sapiens
agaguuugacacgaagc

SEQ ID NO: 959 - RNA, 17 nt, Homo Sapiens
aguuugacacgaagccu

SEQ ID NO: 960 - RNA, 17 nt, Homo Sapiens
gacacgaagccuuauuu

SEQ ID NO: 961 - RNA, 17 nt, Homo Sapiens
gaagccuuauuucuaga

SEQ ID NO: 962 - RNA, 17 nt, Homo Sapiens
uucuagaagcacaugug

SEQ ID NO: 963 - RNA, 17 nt, Homo Sapiens
cuagaagcacaugugua

SEQ ID NO: 964 - RNA, 17 nt, Homo Sapiens
agaagcacauguguauu

SEQ ID NO: 965 - RNA, 17 nt, Homo Sapiens
aagcacauguguauuua

SEQ ID NO: 966 - RNA, 17 nt, Homo Sapiens
gcacauguguauuuaua

SEQ ID NO: 967 - RNA, 17 nt, Homo Sapiens
acauguguauuuauacc

SEQ ID NO: 968 - RNA, 17 nt, Homo Sapiens
guguauuuauaccccca

SEQ ID NO: 969 - RNA, 17 nt, Homo Sapiens
guauuuauacccccagg

SEQ ID NO: 970 - RNA, 17 nt, Homo Sapiens
cccaggaaacuagcuuu

SEQ ID NO: 971 - RNA, 17 nt, Homo Sapiens
ggaaacuagcuuuugcc

SEQ ID NO: 972 - RNA, 17 nt, Homo Sapiens
uagcuuuugccaguauu

SEQ ID NO: 973 - RNA, 17 nt, Homo Sapiens
uuuugccaguauuaugc

SEQ ID NO: 974 - RNA, 17 nt, Homo Sapiens
uugccaguauuaugcau

SEQ ID NO: 975 - RNA, 17 nt, Homo Sapiens
ccaguauuaugcauaua

SEQ ID NO: 976 - RNA, 17 nt, Homo Sapiens
aguauuaugcauauaua

SEQ ID NO: 977 - RNA, 17 nt, Homo Sapiens
uauuaugcauauauaag

SEQ ID NO: 978 - RNA, 17 nt, Homo Sapiens
uuaugcauauauaaguu

SEQ ID NO: 979 - RNA, 17 nt, Homo Sapiens
augcauauauaaguuua

SEQ ID NO: 980 - RNA, 17 nt, Homo Sapiens
auauauaaguuuacacc

SEQ ID NO: 981 - RNA, 17 nt, Homo Sapiens
auaaguuuacaccuuua

SEQ ID NO: 982 - RNA, 17 nt, Homo Sapiens
aaguuuacaccuuuauc

SEQ ID NO: 983 - RNA, 17 nt, Homo Sapiens
acaccuuuaucuuucca

SEQ ID NO: 984 - RNA, 17 nt, Homo Sapiens
aucuuuccaugggagcc

SEQ ID NO: 985 - RNA, 17 nt, Homo Sapiens
ccaugggagccagcugc

SEQ ID NO: 986 - RNA, 17 nt, Homo Sapiens
gggagccagcugcuuuu

SEQ ID NO: 987 - RNA, 17 nt, Homo Sapiens
agccagcugcuuuuugu

SEQ ID NO: 988 - RNA, 17 nt, Homo Sapiens
ugcuuuuugugauuuuu

SEQ ID NO: 989 - RNA, 17 nt, Homo Sapiens
uuuuugugauuuuuuua

SEQ ID NO: 990 - RNA, 17 nt, Homo Sapiens
uuuuuuuaauagugcuu

SEQ ID NO: 991 - RNA, 17 nt, Homo Sapiens
uuuuaauagugcuuuuu

SEQ ID NO: 992 - RNA, 17 nt, Homo Sapiens
uuaauagugcuuuuuuu

SEQ ID NO: 993 - RNA, 17 nt, Homo Sapiens
uuuuuuugacuaacaag

SEQ ID NO: 994 - RNA, 17 nt, Homo Sapiens
uuugacuaacaagaaug

SEQ ID NO: 995 - RNA, 17 nt, Homo Sapiens
uaacaagaauguaacuc

SEQ ID NO: 996 - RNA, 17 nt, Homo Sapiens
acaagaauguaacucca

SEQ ID NO: 997 - RNA, 17 nt, Homo Sapiens
agaauguaacuccagau

SEQ ID NO: 998 - RNA, 17 nt, Homo Sapiens
aacuccagauagagaaa

SEQ ID NO: 999 - RNA, 17 nt, Homo Sapiens
auagagaaauagugaca

SEQ ID NO: 1000 - RNA, 17 nt, Homo Sapiens
gagaaauagugacaagu

SEQ ID NO: 1001 - RNA, 17 nt, Homo Sapiens
aaauagugacaagugaa

SEQ ID NO: 1002 - RNA, 17 nt, Homo Sapiens
agugacaagugaagaac

SEQ ID NO: 1003 - RNA, 17 nt, Homo Sapiens
agugaagaacacuacug

SEQ ID NO: 1004 - RNA, 17 nt, Homo Sapiens
ugaagaacacuacugcu

SEQ ID NO: 1005 - RNA, 17 nt, Homo Sapiens
agaacacuacugcuaaa

SEQ ID NO: 1006 - RNA, 17 nt, Homo Sapiens
acacuacugcuaaaucc

SEQ ID NO: 1007 - RNA, 17 nt, Homo Sapiens
acugcuaaauccucaug

SEQ ID NO: 1008 - RNA, 17 nt, Homo Sapiens
aaauccucauguuacuc

SEQ ID NO: 1009 - RNA, 17 nt, Homo Sapiens
auccucauguuacucag

SEQ ID NO: 1010 - RNA, 17 nt, Homo Sapiens
cucauguuacucagugu

SEQ ID NO: 1011 - RNA, 17 nt, Homo Sapiens
guuacucaguguuagag

SEQ ID NO: 1012 - RNA, 17 nt, Homo Sapiens
uacucaguguuagagaa

SEQ ID NO: 1013 - RNA, 17 nt, Homo Sapiens
uuagagaaauccuuccu

SEQ ID NO: 1014 - RNA, 17 nt, Homo Sapiens
cuuccuaaacccaauga

SEQ ID NO: 1015 - RNA, 17 nt, Homo Sapiens
uaaacccaaugacuucc

SEQ ID NO: 1016 - RNA, 17 nt, Homo Sapiens
acccaaugacuucccug

SEQ ID NO: 1017 - RNA, 17 nt, Homo Sapiens
acuucccugcuccaacc

SEQ ID NO: 1018 - RNA, 17 nt, Homo Sapiens
cugcuccaacccccgcc

SEQ ID NO: 1019 - RNA, 17 nt, Homo Sapiens
caacccccgccaccuca

SEQ ID NO: 1020 - RNA, 17 nt, Homo Sapiens
cccccgccaccucaggg

SEQ ID NO: 1021 - RNA, 17 nt, Homo Sapiens
accucagggcacgcagg

SEQ ID NO: 1022 - RNA, 17 nt, Homo Sapiens
cucagggcacgcaggac

SEQ ID NO: 1023 - RNA, 17 nt, Homo Sapiens
cagggcacgcaggacca

SEQ ID NO: 1024 - RNA, 17 nt, Homo Sapiens
cacgcaggaccaguuug

SEQ ID NO: 1025 - RNA, 17 nt, Homo Sapiens
caggaccaguuugauug

SEQ ID NO: 1026 - RNA, 17 nt, Homo Sapiens
ccaguuugauugaggag

SEQ ID NO: 1027 - RNA, 17 nt, Homo Sapiens
auugaggagcugcacug

SEQ ID NO: 1028 - RNA, 17 nt, Homo Sapiens
gaggagcugcacugauc

SEQ ID NO: 1029 - RNA, 17 nt, Homo Sapiens
ggagcugcacugaucac

SEQ ID NO: 1030 - RNA, 17 nt, Homo Sapiens
cugcacugaucacccaa

SEQ ID NO: 1031 - RNA, 17 nt, Homo Sapiens
cacugaucacccaaugc

SEQ ID NO: 1032 - RNA, 17 nt, Homo Sapiens
aucacccaaugcaucac

SEQ ID NO: 1033 - RNA, 17 nt, Homo Sapiens
cacccaaugcaucacgu

SEQ ID NO: 1034 - RNA, 17 nt, Homo Sapiens
cccaaugcaucacguac

SEQ ID NO: 1035 - RNA, 17 nt, Homo Sapiens
aaugcaucacguacccc

SEQ ID NO: 1036 - RNA, 17 nt, Homo Sapiens
ugcaucacguaccccac

SEQ ID NO: 1037 - RNA, 17 nt, Homo Sapiens
caucacguaccccacug

SEQ ID NO: 1038 - RNA, 17 nt, Homo Sapiens
cguaccccacugggcca

SEQ ID NO: 1039 - RNA, 17 nt, Homo Sapiens
cccacugggccagcccu

SEQ ID NO: 1040 - RNA, 17 nt, Homo Sapiens
cugggccagcccugcag

SEQ ID NO: 1041 - RNA, 17 nt, Homo Sapiens
ccagcccugcagcccaa

SEQ ID NO: 1042 - RNA, 17 nt, Homo Sapiens
gcccugcagcccaaaac

SEQ ID NO: 1043 - RNA, 17 nt, Homo Sapiens
agcccaaaacccagggc

SEQ ID NO: 1044 - RNA, 17 nt, Homo Sapiens
aacccagggcaacaagc

SEQ ID NO: 1045 - RNA, 17 nt, Homo Sapiens
ccagggcaacaagcccg

SEQ ID NO: 1046 - RNA, 17 nt, Homo Sapiens
ggcaacaagcccguuag

SEQ ID NO: 1047 - RNA, 17 nt, Homo Sapiens
acaagcccguuagcccc

SEQ ID NO: 1048 - RNA, 17 nt, Homo Sapiens
gcccguuagccccaggg

SEQ ID NO: 1049 - RNA, 17 nt, Homo Sapiens
cccaggggaucacuggc

SEQ ID NO: 1050 - RNA, 17 nt, Homo Sapiens
aggggaucacuggcugg

SEQ ID NO: 1051 - RNA, 17 nt, Homo Sapiens
gaucacuggcuggccug

SEQ ID NO: 1052 - RNA, 17 nt, Homo Sapiens
acuggcuggccugagca

SEQ ID NO: 1053 - RNA, 17 nt, Homo Sapiens
uggccugagcaacaucu

SEQ ID NO: 1054 - RNA, 17 nt, Homo Sapiens
ccugagcaacaucucgg

SEQ ID NO: 1055 - RNA, 17 nt, Homo Sapiens
ugagcaacaucucggga

SEQ ID NO: 1056 - RNA, 17 nt, Homo Sapiens
ucucgggaguccucuag

SEQ ID NO: 1057 - RNA, 17 nt, Homo Sapiens
guccucuagcaggccua

SEQ ID NO: 1058 - RNA, 17 nt, Homo Sapiens
ucuagcaggccuaagac

SEQ ID NO: 1059 - RNA, 17 nt, Homo Sapiens
ggccuaagacaugugag

SEQ ID NO: 1060 - RNA, 17 nt, Homo Sapiens
ccuaagacaugugagga

SEQ ID NO: 1061 - RNA, 17 nt, Homo Sapiens
uaagacaugugaggagg

SEQ ID NO: 1062 - RNA, 17 nt, Homo Sapiens
gaaaaaaagcaaaaagc

SEQ ID NO: 1063 - RNA, 17 nt, Homo Sapiens
agcaaaaagcaagggag

SEQ ID NO: 1064 - RNA, 17 nt, Homo Sapiens
aaagagaaaccgggaga

SEQ ID NO: 1065 - RNA, 17 nt, Homo Sapiens
gggagaaggcaugagaa

SEQ ID NO: 1066 - RNA, 17 nt, Homo Sapiens
gagaaggcaugagaaag

SEQ ID NO: 1067 - RNA, 17 nt, Homo Sapiens
gagaaagaauuugagac

SEQ ID NO: 1068 - RNA, 17 nt, Homo Sapiens
aauuugagacgcaccau

SEQ ID NO: 1069 - RNA, 17 nt, Homo Sapiens
uuugagacgcaccaugu

SEQ ID NO: 1070 - RNA, 17 nt, Homo Sapiens
ugagacgcaccaugugg

SEQ ID NO: 1071 - RNA, 17 nt, Homo Sapiens
gacgcaccaugugggca

SEQ ID NO: 1072 - RNA, 17 nt, Homo Sapiens
cgcaccaugugggcacg

SEQ ID NO: 1073 - RNA, 17 nt, Homo Sapiens
ccaugugggcacggagg

SEQ ID NO: 1074 - RNA, 17 nt, Homo Sapiens
augugggcacggagggg

SEQ ID NO: 1075 - RNA, 17 nt, Homo Sapiens
ggagggggacggggcuc

SEQ ID NO: 1076 - RNA, 17 nt, Homo Sapiens
gggacggggcucagcaa

SEQ ID NO: 1077 - RNA, 17 nt, Homo Sapiens
ggggcucagcaaugcca

SEQ ID NO: 1078 - RNA, 17 nt, Homo Sapiens
gcucagcaaugccauuu

SEQ ID NO: 1079 - RNA, 17 nt, Homo Sapiens
ucagcaaugccauuuca

SEQ ID NO: 1080 - RNA, 17 nt, Homo Sapiens
gcaaugccauuucagug

SEQ ID NO: 1081 - RNA, 17 nt, Homo Sapiens
ccauuucaguggcuucc

SEQ ID NO: 1082 - RNA, 17 nt, Homo Sapiens
uuucaguggcuucccag

SEQ ID NO: 1083 - RNA, 17 nt, Homo Sapiens
gcuucccagcucugacc

SEQ ID NO: 1084 - RNA, 17 nt, Homo Sapiens
cagcucugacccuucua

SEQ ID NO: 1085 - RNA, 17 nt, Homo Sapiens
acccuucuacauuugag

SEQ ID NO: 1086 - RNA, 17 nt, Homo Sapiens
ccuucuacauuugaggg

SEQ ID NO: 1087 - RNA, 17 nt, Homo Sapiens
auuugagggcccagcca

SEQ ID NO: 1088 - RNA, 17 nt, Homo Sapiens
agggcccagccaggagc

SEQ ID NO: 1089 - RNA, 17 nt, Homo Sapiens
agccaggagcagaugga

SEQ ID NO: 1090 - RNA, 17 nt, Homo Sapiens
aggagcagauggacagc

SEQ ID NO: 1091 - RNA, 17 nt, Homo Sapiens
gcagauggacagcgaug

SEQ ID NO: 1092 - RNA, 17 nt, Homo Sapiens
gauggacagcgaugagg

SEQ ID NO: 1093 - RNA, 17 nt, Homo Sapiens
ggacagcgaugagggga

SEQ ID NO: 1094 - RNA, 17 nt, Homo Sapiens
augaggggacauuuucu

SEQ ID NO: 1095 - RNA, 17 nt, Homo Sapiens
gaggggacauuuucugg

SEQ ID NO: 1096 - RNA, 17 nt, Homo Sapiens
uuuucuggauucuggga

SEQ ID NO: 1097 - RNA, 17 nt, Homo Sapiens
ucugggaggcaagaaaa

SEQ ID NO: 1098 - RNA, 17 nt, Homo Sapiens
agaaaaggacaaauauc

SEQ ID NO: 1099 - RNA, 17 nt, Homo Sapiens
aaggacaaauaucuuuu

SEQ ID NO: 1100 - RNA, 17 nt, Homo Sapiens
ggacaaauaucuuuuuu

SEQ ID NO: 1101 - RNA, 17 nt, Homo Sapiens
uuuuuggaacuaaagca

SEQ ID NO: 1102 - RNA, 17 nt, Homo Sapiens
gaacuaaagcaaauuuu

SEQ ID NO: 1103 - RNA, 17 nt, Homo Sapiens
uaaagcaaauuuuagac

SEQ ID NO: 1104 - RNA, 17 nt, Homo Sapiens
aauuuuagaccuuuacc

SEQ ID NO: 1105 - RNA, 17 nt, Homo Sapiens
agaccuuuaccuaugga

SEQ ID NO: 1106 - RNA, 17 nt, Homo Sapiens
cuuuaccuauggaagug

SEQ ID NO: 1107 - RNA, 17 nt, Homo Sapiens
cuauggaagugguucua

SEQ ID NO: 1108 - RNA, 17 nt, Homo Sapiens
uggaagugguucuaugu

SEQ ID NO: 1109 - RNA, 17 nt, Homo Sapiens
gugguucuauguccauu

SEQ ID NO: 1110 - RNA, 17 nt, Homo Sapiens
gguucuauguccauucu

SEQ ID NO: 1111 - RNA, 17 nt, Homo Sapiens
cuauguccauucucauu

SEQ ID NO: 1112 - RNA, 17 nt, Homo Sapiens
ccauucucauucguggc

SEQ ID NO: 1113 - RNA, 17 nt, Homo Sapiens
ucucauucguggcaugu

SEQ ID NO: 1114 - RNA, 17 nt, Homo Sapiens
cauucguggcauguuuu

SEQ ID NO: 1115 - RNA, 17 nt, Homo Sapiens
uucguggcauguuuuga

SEQ ID NO: 1116 - RNA, 17 nt, Homo Sapiens
cguggcauguuuugauu

SEQ ID NO: 1117 - RNA, 17 nt, Homo Sapiens
auguuuugauuuguagc

SEQ ID NO: 1118 - RNA, 17 nt, Homo Sapiens
uuugauuuguagcacug

SEQ ID NO: 1119 - RNA, 17 nt, Homo Sapiens
gauuuguagcacugagg

SEQ ID NO: 1120 - RNA, 17 nt, Homo Sapiens
uuuguagcacugagggu

SEQ ID NO: 1121 - RNA, 17 nt, Homo Sapiens
cacugaggguggcacuc

SEQ ID NO: 1122 - RNA, 17 nt, Homo Sapiens
ugaggguggcacucaac

SEQ ID NO: 1123 - RNA, 17 nt, Homo Sapiens
aggguggcacucaacuc

SEQ ID NO: 1124 - RNA, 17 nt, Homo Sapiens
ggcacucaacucugagc

SEQ ID NO: 1125 - RNA, 17 nt, Homo Sapiens
aacucugagcccauacu

SEQ ID NO: 1126 - RNA, 17 nt, Homo Sapiens
cugagcccauacuuuug

SEQ ID NO: 1127 - RNA, 17 nt, Homo Sapiens
gagcccauacuuuuggc

SEQ ID NO: 1128 - RNA, 17 nt, Homo Sapiens
uacuuuuggcuccucua

SEQ ID NO: 1129 - RNA, 17 nt, Homo Sapiens
cuccucuaguaagaugc

SEQ ID NO: 1130 - RNA, 17 nt, Homo Sapiens
cuaguaagaugcacuga

SEQ ID NO: 1131 - RNA, 17 nt, Homo Sapiens
aguaagaugcacugaaa

SEQ ID NO: 1132 - RNA, 17 nt, Homo Sapiens
uaagaugcacugaaaac

SEQ ID NO: 1133 - RNA, 17 nt, Homo Sapiens
cacugaaaacuuagcca

SEQ ID NO: 1134 - RNA, 17 nt, Homo Sapiens
aaaacuuagccagaguu

SEQ ID NO: 1135 - RNA, 17 nt, Homo Sapiens
uagccagaguuagguug

SEQ ID NO: 1136 - RNA, 17 nt, Homo Sapiens
agaguuagguugucucc

SEQ ID NO: 1137 - RNA, 17 nt, Homo Sapiens
guuagguugucuccagg

SEQ ID NO: 1138 - RNA, 17 nt, Homo Sapiens
gucuccaggccaugaug

SEQ ID NO: 1139 - RNA, 17 nt, Homo Sapiens
uccaggccaugauggcc

SEQ ID NO: 1140 - RNA, 17 nt, Homo Sapiens
aggccaugauggccuua

SEQ ID NO: 1141 - RNA, 17 nt, Homo Sapiens
ccaugauggccuuacac

SEQ ID NO: 1142 - RNA, 17 nt, Homo Sapiens
auggccuuacacugaaa

SEQ ID NO: 1143 - RNA, 17 nt, Homo Sapiens
ggccuuacacugaaaau

SEQ ID NO: 1144 - RNA, 17 nt, Homo Sapiens
cacugaaaaugucacau

SEQ ID NO: 1145 - RNA, 17 nt, Homo Sapiens
cugaaaaugucacauuc

SEQ ID NO: 1146 - RNA, 17 nt, Homo Sapiens
aaaaugucacauucuau

SEQ ID NO: 1147 - RNA, 17 nt, Homo Sapiens
aaugucacauucuauuu

SEQ ID NO: 1148 - RNA, 17 nt, Homo Sapiens
cacauucuauuuugggu

SEQ ID NO: 1149 - RNA, 17 nt, Homo Sapiens
uauuuuggguauuaaua

SEQ ID NO: 1150 - RNA, 17 nt, Homo Sapiens
uuuuggguauuaauaua

SEQ ID NO: 1151 - RNA, 17 nt, Homo Sapiens
ggguauuaauauauagu

SEQ ID NO: 1152 - RNA, 17 nt, Homo Sapiens
guauuaauauauagucc

SEQ ID NO: 1153 - RNA, 17 nt, Homo Sapiens
auuaauauauaguccag

SEQ ID NO: 1154 - RNA, 17 nt, Homo Sapiens
aauauauaguccagaca

SEQ ID NO: 1155 - RNA, 17 nt, Homo Sapiens
uaguccagacacuuaac

SEQ ID NO: 1156 - RNA, 17 nt, Homo Sapiens
guccagacacuuaacuc

SEQ ID NO: 1157 - RNA, 17 nt, Homo Sapiens
gacacuuaacucaauuu

SEQ ID NO: 1158 - RNA, 17 nt, Homo Sapiens
uuaacucaauuucuugg

SEQ ID NO: 1159 - RNA, 17 nt, Homo Sapiens
auuucuugguauuauuc

SEQ ID NO: 1160 - RNA, 17 nt, Homo Sapiens
uucuugguauuauucug

SEQ ID NO: 1161 - RNA, 17 nt, Homo Sapiens
uugguauuauucuguuu

SEQ ID NO: 1162 - RNA, 17 nt, Homo Sapiens
auuauucuguuuugcac

SEQ ID NO: 1163 - RNA, 17 nt, Homo Sapiens
ucuguuuugcacaguua

SEQ ID NO: 1164 - RNA, 17 nt, Homo Sapiens
uguuuugcacaguuagu

SEQ ID NO: 1165 - RNA, 17 nt, Homo Sapiens
uuugcacaguuaguugu

SEQ ID NO: 1166 - RNA, 17 nt, Homo Sapiens
cacaguuaguugugaaa

SEQ ID NO: 1167 - RNA, 17 nt, Homo Sapiens
aguuaguugugaaagaa

SEQ ID NO: 1168 - RNA, 17 nt, Homo Sapiens
gaaagaaagcugagaag

SEQ ID NO: 1169 - RNA, 17 nt, Homo Sapiens
ugagaagaaugaaaaug

SEQ ID NO: 1170 - RNA, 17 nt, Homo Sapiens
gaaugaaaaugcagucc

SEQ ID NO: 1171 - RNA, 17 nt, Homo Sapiens
augaaaaugcaguccug

SEQ ID NO: 1172 - RNA, 17 nt, Homo Sapiens
aaaaugcaguccugagg

SEQ ID NO: 1173 - RNA, 17 nt, Homo Sapiens
ugaggagaguuuucucc

SEQ ID NO: 1174 - RNA, 17 nt, Homo Sapiens
uuuucuccauaucaaaa

SEQ ID NO: 1175 - RNA, 17 nt, Homo Sapiens
uucuccauaucaaaacg

SEQ ID NO: 1176 - RNA, 17 nt, Homo Sapiens
auaucaaaacgagggcu

SEQ ID NO: 1177 - RNA, 17 nt, Homo Sapiens
aaacgagggcugaugga

SEQ ID NO: 1178 - RNA, 17 nt, Homo Sapiens
gagggcugauggaggaa

SEQ ID NO: 1179 - RNA, 17 nt, Homo Sapiens
ggaaaaaggucaauaag

SEQ ID NO: 1180 - RNA, 17 nt, Homo Sapiens
aaaggucaauaagguca

SEQ ID NO: 1181 - RNA, 17 nt, Homo Sapiens
ucaauaaggucaaggga

SEQ ID NO: 1182 - RNA, 17 nt, Homo Sapiens
aagggaagaccccgucu

SEQ ID NO: 1183 - RNA, 17 nt, Homo Sapiens
aagaccccgucucuaua

SEQ ID NO: 1184 - RNA, 17 nt, Homo Sapiens
ccgucucuauaccaacc

SEQ ID NO: 1185 - RNA, 17 nt, Homo Sapiens
gucucuauaccaaccaa

SEQ ID NO: 1186 - RNA, 17 nt, Homo Sapiens
cuauaccaaccaaacca

SEQ ID NO: 1187 - RNA, 17 nt, Homo Sapiens
ccaaccaaaccaauuca

SEQ ID NO: 1188 - RNA, 17 nt, Homo Sapiens
ccaaaccaauucaccaa

SEQ ID NO: 1189 - RNA, 17 nt, Homo Sapiens
accaauucaccaacaca

SEQ ID NO: 1190 - RNA, 17 nt, Homo Sapiens
auucaccaacacaguug

SEQ ID NO: 1191 - RNA, 17 nt, Homo Sapiens
ucaccaacacaguuggg

SEQ ID NO: 1192 - RNA, 17 nt, Homo Sapiens
ccaacacaguugggacc

SEQ ID NO: 1193 - RNA, 17 nt, Homo Sapiens
caguugggacccaaaac

SEQ ID NO: 1194 - RNA, 17 nt, Homo Sapiens
gacccaaaacacaggaa

SEQ ID NO: 1195 - RNA, 17 nt, Homo Sapiens
cccaaaacacaggaagu

SEQ ID NO: 1196 - RNA, 17 nt, Homo Sapiens
cacaggaagucagucac

SEQ ID NO: 1197 - RNA, 17 nt, Homo Sapiens
ggaagucagucacguuu

SEQ ID NO: 1198 - RNA, 17 nt, Homo Sapiens
agucagucacguuuccu

SEQ ID NO: 1199 - RNA, 17 nt, Homo Sapiens
ucagucacguuuccuuu

SEQ ID NO: 1200 - RNA, 17 nt, Homo Sapiens
uccuuuucauuuaaugg

SEQ ID NO: 1201 - RNA, 17 nt, Homo Sapiens
uucauuuaauggggauu

SEQ ID NO: 1202 - RNA, 17 nt, Homo Sapiens
uaauggggauuccacua

SEQ ID NO: 1203 - RNA, 17 nt, Homo Sapiens
gggauuccacuaucuca

SEQ ID NO: 1204 - RNA, 17 nt, Homo Sapiens
auuccacuaucucacac

SEQ ID NO: 1205 - RNA, 17 nt, Homo Sapiens
acuaucucacacuaauc

SEQ ID NO: 1206 - RNA, 17 nt, Homo Sapiens
uaucucacacuaaucug

SEQ ID NO: 1207 - RNA, 17 nt, Homo Sapiens
ucacacuaaucugaaag

SEQ ID NO: 1208 - RNA, 17 nt, Homo Sapiens
cugaaaggauguggaag

SEQ ID NO: 1209 - RNA, 17 nt, Homo Sapiens
gaaaggauguggaagag

SEQ ID NO: 1210 - RNA, 17 nt, Homo Sapiens
guggaagagcauuagcu

SEQ ID NO: 1211 - RNA, 17 nt, Homo Sapiens
ggaagagcauuagcugg

SEQ ID NO: 1212 - RNA, 17 nt, Homo Sapiens
gagcauuagcuggcgca

SEQ ID NO: 1213 - RNA, 17 nt, Homo Sapiens
auuagcuggcgcauauu

SEQ ID NO: 1214 - RNA, 17 nt, Homo Sapiens
uagcuggcgcauauuaa

SEQ ID NO: 1215 - RNA, 17 nt, Homo Sapiens
gcuggcgcauauuaagc

SEQ ID NO: 1216 - RNA, 17 nt, Homo Sapiens
uggcgcauauuaagcac

SEQ ID NO: 1217 - RNA, 17 nt, Homo Sapiens
cauauuaagcacuuuaa

SEQ ID NO: 1218 - RNA, 17 nt, Homo Sapiens
uauuaagcacuuuaagc

SEQ ID NO: 1219 - RNA, 17 nt, Homo Sapiens
cacuuuaagcuccuuga

SEQ ID NO: 1220 - RNA, 17 nt, Homo Sapiens
cuccuugaguaaaaagg

SEQ ID NO: 1221 - RNA, 17 nt, Homo Sapiens
guaaaaaggugguaugu

SEQ ID NO: 1222 - RNA, 17 nt, Homo Sapiens
aaaaggugguauguaau

SEQ ID NO: 1223 - RNA, 17 nt, Homo Sapiens
aaggugguauguaauuu

SEQ ID NO: 1224 - RNA, 17 nt, Homo Sapiens
ggugguauguaauuuau

SEQ ID NO: 1225 - RNA, 17 nt, Homo Sapiens
gguauguaauuuaugca

SEQ ID NO: 1226 - RNA, 17 nt, Homo Sapiens
uguaauuuaugcaaggu

SEQ ID NO: 1227 - RNA, 17 nt, Homo Sapiens
uaauuuaugcaagguau

SEQ ID NO: 1228 - RNA, 17 nt, Homo Sapiens
uaugcaagguauuucuc

SEQ ID NO: 1229 - RNA, 17 nt, Homo Sapiens
ugcaagguauuucucca

SEQ ID NO: 1230 - RNA, 17 nt, Homo Sapiens
uuucuccaguugggacu

SEQ ID NO: 1231 - RNA, 17 nt, Homo Sapiens
caguugggacucaggau

SEQ ID NO: 1232 - RNA, 17 nt, Homo Sapiens
gacucaggauauuaguu

SEQ ID NO: 1233 - RNA, 17 nt, Homo Sapiens
cucaggauauuaguuaa

SEQ ID NO: 1234 - RNA, 17 nt, Homo Sapiens
ggauauuaguuaaugag

SEQ ID NO: 1235 - RNA, 17 nt, Homo Sapiens
auuaguuaaugagccau

SEQ ID NO: 1236 - RNA, 17 nt, Homo Sapiens
guuaaugagccaucacu

SEQ ID NO: 1237 - RNA, 17 nt, Homo Sapiens
aaugagccaucacuaga

SEQ ID NO: 1238 - RNA, 17 nt, Homo Sapiens
gagccaucacuagaaga

SEQ ID NO: 1239 - RNA, 17 nt, Homo Sapiens
gaagaaaagcccauuuu

SEQ ID NO: 1240 - RNA, 17 nt, Homo Sapiens
aaaagcccauuuucaac

SEQ ID NO: 1241 - RNA, 17 nt, Homo Sapiens
cauuuucaacugcuuug

SEQ ID NO: 1242 - RNA, 17 nt, Homo Sapiens
uuucaacugcuuugaaa

SEQ ID NO: 1243 - RNA, 17 nt, Homo Sapiens
gcuuugaaacuugccug

SEQ ID NO: 1244 - RNA, 17 nt, Homo Sapiens
ugaaacuugccuggggu

SEQ ID NO: 1245 - RNA, 17 nt, Homo Sapiens
ugccuggggucugagca

SEQ ID NO: 1246 - RNA, 17 nt, Homo Sapiens
gggucugagcaugaugg

SEQ ID NO: 1247 - RNA, 17 nt, Homo Sapiens
gucugagcaugauggga

SEQ ID NO: 1248 - RNA, 17 nt, Homo Sapiens
ugagcaugaugggaaua

SEQ ID NO: 1249 - RNA, 17 nt, Homo Sapiens
ugaugggaauagggaga

SEQ ID NO: 1250 - RNA, 17 nt, Homo Sapiens
auagggagacaggguag

SEQ ID NO: 1251 - RNA, 17 nt, Homo Sapiens
gagacaggguaggaaag

SEQ ID NO: 1252 - RNA, 17 nt, Homo Sapiens
aggaaagggcgccuacu

SEQ ID NO: 1253 - RNA, 17 nt, Homo Sapiens
gaaagggcgccuacucu

SEQ ID NO: 1254 - RNA, 17 nt, Homo Sapiens
gggcgccuacucuucag

SEQ ID NO: 1255 - RNA, 17 nt, Homo Sapiens
ucuucagggucuaaaga

SEQ ID NO: 1256 - RNA, 17 nt, Homo Sapiens
gucuaaagaucaagugg

SEQ ID NO: 1257 - RNA, 17 nt, Homo Sapiens
aagaucaagugggccuu

SEQ ID NO: 1258 - RNA, 17 nt, Homo Sapiens
ucaagugggccuuggau

SEQ ID NO: 1259 - RNA, 17 nt, Homo Sapiens
ggccuuggaucgcuaag

SEQ ID NO: 1260 - RNA, 17 nt, Homo Sapiens
cuuggaucgcuaagcug

SEQ ID NO: 1261 - RNA, 17 nt, Homo Sapiens
aucgcuaagcuggcucu

SEQ ID NO: 1262 - RNA, 17 nt, Homo Sapiens
cuaagcuggcucuguuu

SEQ ID NO: 1263 - RNA, 17 nt, Homo Sapiens
cuggcucuguuugaugc

SEQ ID NO: 1264 - RNA, 17 nt, Homo Sapiens
ucuguuugaugcuauuu

SEQ ID NO: 1265 - RNA, 17 nt, Homo Sapiens
uguuugaugcuauuuau

SEQ ID NO: 1266 - RNA, 17 nt, Homo Sapiens
uugaugcuauuuaugca

SEQ ID NO: 1267 - RNA, 17 nt, Homo Sapiens
ugcuauuuaugcaaguu

SEQ ID NO: 1268 - RNA, 17 nt, Homo Sapiens
cuauuuaugcaaguuag

SEQ ID NO: 1269 - RNA, 17 nt, Homo Sapiens
uuaugcaaguuaggguc

SEQ ID NO: 1270 - RNA, 17 nt, Homo Sapiens
aaguuagggucuaugua

SEQ ID NO: 1271 - RNA, 17 nt, Homo Sapiens
uagggucuauguauuua

SEQ ID NO: 1272 - RNA, 17 nt, Homo Sapiens
gggucuauguauuuagg

SEQ ID NO: 1273 - RNA, 17 nt, Homo Sapiens
gucuauguauuuaggau

SEQ ID NO: 1274 - RNA, 17 nt, Homo Sapiens
uauuuaggaugcgccua

SEQ ID NO: 1275 - RNA, 17 nt, Homo Sapiens
uuuaggaugcgccuacu

SEQ ID NO: 1276 - RNA, 17 nt, Homo Sapiens
uaggaugcgccuacucu

SEQ ID NO: 1277 - RNA, 17 nt, Homo Sapiens
augcgccuacucuucag

SEQ ID NO: 1278 - RNA, 17 nt, Homo Sapiens
ucuucagggucuaaaga

SEQ ID NO: 1279 - RNA, 17 nt, Homo Sapiens
gucuaaagaucaagugg

SEQ ID NO: 1280 - RNA, 17 nt, Homo Sapiens
aagaucaagugggccuu

SEQ ID NO: 1281 - RNA, 17 nt, Homo Sapiens
ucaagugggccuuggau

SEQ ID NO: 1282 - RNA, 17 nt, Homo Sapiens
ggccuuggaucgcuaag

SEQ ID NO: 1283 - RNA, 17 nt, Homo Sapiens
cuuggaucgcuaagcug

SEQ ID NO: 1284 - RNA, 17 nt, Homo Sapiens
aucgcuaagcuggcucu

SEQ ID NO: 1285 - RNA, 17 nt, Homo Sapiens
cuaagcuggcucuguuu

SEQ ID NO: 1286 - RNA, 17 nt, Homo Sapiens
cuggcucuguuugaugc

SEQ ID NO: 1287 - RNA, 17 nt, Homo Sapiens
ucuguuugaugcuauuu

SEQ ID NO: 1288 - RNA, 17 nt, Homo Sapiens
uguuugaugcuauuuau

SEQ ID NO: 1289 - RNA, 17 nt, Homo Sapiens
uugaugcuauuuaugca

SEQ ID NO: 1290 - RNA, 17 nt, Homo Sapiens
ugcuauuuaugcaaguu

SEQ ID NO: 1291 - RNA, 17 nt, Homo Sapiens
cuauuuaugcaaguuag

SEQ ID NO: 1292 - RNA, 17 nt, Homo Sapiens
uuaugcaaguuaggguc

SEQ ID NO: 1293 - RNA, 17 nt, Homo Sapiens
aaguuagggucuaugua

SEQ ID NO: 1294 - RNA, 17 nt, Homo Sapiens
uagggucuauguauuua

SEQ ID NO: 1295 - RNA, 17 nt, Homo Sapiens
gggucuauguauuuagg

SEQ ID NO: 1296 - RNA, 17 nt, Homo Sapiens
gucuauguauuuaggau

SEQ ID NO: 1297 - RNA, 17 nt, Homo Sapiens
uauuuaggaugucugca

SEQ ID NO: 1298 - RNA, 17 nt, Homo Sapiens
uuuaggaugucugcacc

SEQ ID NO: 1299 - RNA, 17 nt, Homo Sapiens
ggaugucugcaccuucu

SEQ ID NO: 1300 - RNA, 17 nt, Homo Sapiens
augucugcaccuucugc

SEQ ID NO: 1301 - RNA, 17 nt, Homo Sapiens
caccuucugcagccagu

SEQ ID NO: 1302 - RNA, 17 nt, Homo Sapiens
cuucugcagccagucag

SEQ ID NO: 1303 - RNA, 17 nt, Homo Sapiens
ugcagccagucagaagc

SEQ ID NO: 1304 - RNA, 17 nt, Homo Sapiens
agucagaagcuggagag

SEQ ID NO: 1305 - RNA, 17 nt, Homo Sapiens
cuggagaggcaacagug

SEQ ID NO: 1306 - RNA, 17 nt, Homo Sapiens
gagaggcaacaguggau

SEQ ID NO: 1307 - RNA, 17 nt, Homo Sapiens
aggcaacaguggauugc

SEQ ID NO: 1308 - RNA, 17 nt, Homo Sapiens
aacaguggauugcugcu

SEQ ID NO: 1309 - RNA, 17 nt, Homo Sapiens
aguggauugcugcuucu

SEQ ID NO: 1310 - RNA, 17 nt, Homo Sapiens
ggauugcugcuucuugg

SEQ ID NO: 1311 - RNA, 17 nt, Homo Sapiens
ggagaagaguaugcuuc

SEQ ID NO: 1312 - RNA, 17 nt, Homo Sapiens
agaagaguaugcuuccu

SEQ ID NO: 1313 - RNA, 17 nt, Homo Sapiens
aagaguaugcuuccuuu

SEQ ID NO: 1314 - RNA, 17 nt, Homo Sapiens
uuccuuuuauccaugua

SEQ ID NO: 1315 - RNA, 17 nt, Homo Sapiens
uuuuauccauguaauuu

SEQ ID NO: 1316 - RNA, 17 nt, Homo Sapiens
uuauccauguaauuuaa

SEQ ID NO: 1317 - RNA, 17 nt, Homo Sapiens
uccauguaauuuaacug

SEQ ID NO: 1318 - RNA, 17 nt, Homo Sapiens
guaauuuaacuguagaa

SEQ ID NO: 1319 - RNA, 17 nt, Homo Sapiens
auuuaacuguagaaccu

SEQ ID NO: 1320 - RNA, 17 nt, Homo Sapiens
acuguagaaccugagcu

SEQ ID NO: 1321 - RNA, 17 nt, Homo Sapiens
gaaccugagcucuaagu

SEQ ID NO: 1322 - RNA, 17 nt, Homo Sapiens
agcucuaaguaaccgaa

SEQ ID NO: 1323 - RNA, 17 nt, Homo Sapiens
ucuaaguaaccgaagaa

SEQ ID NO: 1324 - RNA, 17 nt, Homo Sapiens
accgaagaauguaugcc

SEQ ID NO: 1325 - RNA, 17 nt, Homo Sapiens
cgaagaauguaugccuc

SEQ ID NO: 1326 - RNA, 17 nt, Homo Sapiens
aagaauguaugccucug

SEQ ID NO: 1327 - RNA, 17 nt, Homo Sapiens
gaauguaugccucuguu

SEQ ID NO: 1328 - RNA, 17 nt, Homo Sapiens
augccucuguucuuaug

SEQ ID NO: 1329 - RNA, 17 nt, Homo Sapiens
cuguucuuaugugccac

SEQ ID NO: 1330 - RNA, 17 nt, Homo Sapiens
guucuuaugugccacau

SEQ ID NO: 1331 - RNA, 17 nt, Homo Sapiens
ucuuaugugccacaucc

SEQ ID NO: 1332 - RNA, 17 nt, Homo Sapiens
uaugugccacauccuug

SEQ ID NO: 1333 - RNA, 17 nt, Homo Sapiens
ugugccacauccuuguu

SEQ ID NO: 1334 - RNA, 17 nt, Homo Sapiens
acauccuuguuuaaagg

SEQ ID NO: 1335 - RNA, 17 nt, Homo Sapiens
guuuaaaggcucucugu

SEQ ID NO: 1336 - RNA, 17 nt, Homo Sapiens
ggcucucuguaugaaga

SEQ ID NO: 1337 - RNA, 17 nt, Homo Sapiens
cucucuguaugaagaga

SEQ ID NO: 1338 - RNA, 17 nt, Homo Sapiens
augaagagaugggaccg

SEQ ID NO: 1339 - RNA, 17 nt, Homo Sapiens
gagaugggaccgucauc

SEQ ID NO: 1340 - RNA, 17 nt, Homo Sapiens
augggaccgucaucagc

SEQ ID NO: 1341 - RNA, 17 nt, Homo Sapiens
ggaccgucaucagcaca

SEQ ID NO: 1342 - RNA, 17 nt, Homo Sapiens
cgucaucagcacauucc

SEQ ID NO: 1343 - RNA, 17 nt, Homo Sapiens
ucaucagcacauucccu

SEQ ID NO: 1344 - RNA, 17 nt, Homo Sapiens
aucagcacauucccuag

SEQ ID NO: 1345 - RNA, 17 nt, Homo Sapiens
auucccuagugagccua

SEQ ID NO: 1346 - RNA, 17 nt, Homo Sapiens
ccuagugagccuacugg

SEQ ID NO: 1347 - RNA, 17 nt, Homo Sapiens
gugagccuacuggcucc

SEQ ID NO: 1348 - RNA, 17 nt, Homo Sapiens
gccuacuggcuccuggc

SEQ ID NO: 1349 - RNA, 17 nt, Homo Sapiens
ggcuccuggcagcggcu

SEQ ID NO: 1350 - RNA, 17 nt, Homo Sapiens
uccuggcagcggcuuuu

SEQ ID NO: 1351 - RNA, 17 nt, Homo Sapiens
uggcagcggcuuuugug

SEQ ID NO: 1352 - RNA, 17 nt, Homo Sapiens
cggcuuuuguggaagac

SEQ ID NO: 1353 - RNA, 17 nt, Homo Sapiens
uguggaagacucacuag

SEQ ID NO: 1354 - RNA, 17 nt, Homo Sapiens
gaagacucacuagccag

SEQ ID NO: 1355 - RNA, 17 nt, Homo Sapiens
acucacuagccagaaga

SEQ ID NO: 1356 - RNA, 17 nt, Homo Sapiens
agagaggagugggacag

SEQ ID NO: 1357 - RNA, 17 nt, Homo Sapiens
ggagugggacaguccuc

SEQ ID NO: 1358 - RNA, 17 nt, Homo Sapiens
gugggacaguccucucc

SEQ ID NO: 1359 - RNA, 17 nt, Homo Sapiens
uccucuccaccaagauc

SEQ ID NO: 1360 - RNA, 17 nt, Homo Sapiens
ccaccaagaucuaaauc

SEQ ID NO: 1361 - RNA, 17 nt, Homo Sapiens
agaucuaaauccaaaca

SEQ ID NO: 1362 - RNA, 17 nt, Homo Sapiens
aaauccaaacaaaagca

SEQ ID NO: 1363 - RNA, 17 nt, Homo Sapiens
aaacaaaagcaggcuag

SEQ ID NO: 1364 - RNA, 17 nt, Homo Sapiens
aaaagcaggcuagagcc

SEQ ID NO: 1365 - RNA, 17 nt, Homo Sapiens
aggcuagagccagaaga

SEQ ID NO: 1366 - RNA, 17 nt, Homo Sapiens
aagagaggacaaaucuu

SEQ ID NO: 1367 - RNA, 17 nt, Homo Sapiens
gaggacaaaucuuuguu

SEQ ID NO: 1368 - RNA, 17 nt, Homo Sapiens
aaaucuuuguuguuccu

SEQ ID NO: 1369 - RNA, 17 nt, Homo Sapiens
ucuuuguuguuccucuu

SEQ ID NO: 1370 - RNA, 17 nt, Homo Sapiens
ucuucuuuacacauacg

SEQ ID NO: 1371 - RNA, 17 nt, Homo Sapiens
uucuuuacacauacgca

SEQ ID NO: 1372 - RNA, 17 nt, Homo Sapiens
cuuuacacauacgcaaa

SEQ ID NO: 1373 - RNA, 17 nt, Homo Sapiens
uuacacauacgcaaacc

SEQ ID NO: 1374 - RNA, 17 nt, Homo Sapiens
acacauacgcaaaccac

SEQ ID NO: 1375 - RNA, 17 nt, Homo Sapiens
auacgcaaaccaccugu

SEQ ID NO: 1376 - RNA, 17 nt, Homo Sapiens
cgcaaaccaccugugac

SEQ ID NO: 1377 - RNA, 17 nt, Homo Sapiens
aaccaccugugacagcu

SEQ ID NO: 1378 - RNA, 17 nt, Homo Sapiens
caccugugacagcuggc

SEQ ID NO: 1379 - RNA, 17 nt, Homo Sapiens
cugugacagcuggcaau

SEQ ID NO: 1380 - RNA, 17 nt, Homo Sapiens
gacagcuggcaauuuua

SEQ ID NO: 1381 - RNA, 17 nt, Homo Sapiens
agcuggcaauuuuauaa

SEQ ID NO: 1382 - RNA, 17 nt, Homo Sapiens
gcaauuuuauaaaucag

SEQ ID NO: 1383 - RNA, 17 nt, Homo Sapiens
uuuuauaaaucagguaa

SEQ ID NO: 1384 - RNA, 17 nt, Homo Sapiens
uaaaucagguaacugga

SEQ ID NO: 1385 - RNA, 17 nt, Homo Sapiens
aucagguaacuggaagg

SEQ ID NO: 1386 - RNA, 17 nt, Homo Sapiens
ggaaggagguuaaacuc

SEQ ID NO: 1387 - RNA, 17 nt, Homo Sapiens
gagguuaaacucagaaa

SEQ ID NO: 1388 - RNA, 17 nt, Homo Sapiens
aaaagaagaccucaguc

SEQ ID NO: 1389 - RNA, 17 nt, Homo Sapiens
agaccucagucaauucu

SEQ ID NO: 1390 - RNA, 17 nt, Homo Sapiens
cucagucaauucucuac

SEQ ID NO: 1391 - RNA, 17 nt, Homo Sapiens
aauucucuacuuuuuuu

SEQ ID NO: 1392 - RNA, 17 nt, Homo Sapiens
uuuuccaaaucagauaa

SEQ ID NO: 1393 - RNA, 17 nt, Homo Sapiens
caaaucagauaauagcc

SEQ ID NO: 1394 - RNA, 17 nt, Homo Sapiens
aucagauaauagcccag

SEQ ID NO: 1395 - RNA, 17 nt, Homo Sapiens
agauaauagcccagcaa

SEQ ID NO: 1396 - RNA, 17 nt, Homo Sapiens
auagcccagcaaauagu

SEQ ID NO: 1397 - RNA, 17 nt, Homo Sapiens
cccagcaaauagugaua

SEQ ID NO: 1398 - RNA, 17 nt, Homo Sapiens
agcaaauagugauaaca

SEQ ID NO: 1399 - RNA, 17 nt, Homo Sapiens
aaauagugauaacaaau

SEQ ID NO: 1400 - RNA, 17 nt, Homo Sapiens
uagugauaacaaauaaa

SEQ ID NO: 1401 - RNA, 17 nt, Homo Sapiens
gauaacaaauaaaaccu

SEQ ID NO: 1402 - RNA, 17 nt, Homo Sapiens
caaauaaaaccuuagcu

SEQ ID NO: 1403 - RNA, 17 nt, Homo Sapiens
aaaccuuagcuguucau

SEQ ID NO: 1404 - RNA, 17 nt, Homo Sapiens
ccuuagcuguucauguc

SEQ ID NO: 1405 - RNA, 17 nt, Homo Sapiens
agcuguucaugucuuga

SEQ ID NO: 1406 - RNA, 17 nt, Homo Sapiens
cuguucaugucuugauu

SEQ ID NO: 1407 - RNA, 17 nt, Homo Sapiens
augucuugauuucaaua

SEQ ID NO: 1408 - RNA, 17 nt, Homo Sapiens
ugauuucaauaauuaau

SEQ ID NO: 1409 - RNA, 17 nt, Homo Sapiens
uuucaauaauuaauucu

SEQ ID NO: 1410 - RNA, 17 nt, Homo Sapiens
aauaauuaauucuuaau

SEQ ID NO: 1411 - RNA, 17 nt, Homo Sapiens
aauucuuaaucauuaag

SEQ ID NO: 1412 - RNA, 17 nt, Homo Sapiens
ucuuaaucauuaagaga

SEQ ID NO: 1413 - RNA, 17 nt, Homo Sapiens
auuaagagaccauaaua

SEQ ID NO: 1414 - RNA, 17 nt, Homo Sapiens
aagagaccauaauaaau

SEQ ID NO: 1415 - RNA, 17 nt, Homo Sapiens
agaccauaauaaauacu

SEQ ID NO: 1416 - RNA, 17 nt, Homo Sapiens
cauaauaaauacuccuu

SEQ ID NO: 1417 - RNA, 17 nt, Homo Sapiens
uaauaaauacuccuuuu

SEQ ID NO: 1418 - RNA, 17 nt, Homo Sapiens
agagaaaagcaaaacca

SEQ ID NO: 1419 - RNA, 17 nt, Homo Sapiens
aaagcaaaaccauuaga

SEQ ID NO: 1420 - RNA, 17 nt, Homo Sapiens
gcaaaaccauuagaauu

SEQ ID NO: 1421 - RNA, 17 nt, Homo Sapiens
ccauuagaauuguuacu

SEQ ID NO: 1422 - RNA, 17 nt, Homo Sapiens
uuagaauuguuacucag

SEQ ID NO: 1423 - RNA, 17 nt, Homo Sapiens
gaauuguuacucagcuc

SEQ ID NO: 1424 - RNA, 17 nt, Homo Sapiens
guuacucagcuccuuca

SEQ ID NO: 1425 - RNA, 17 nt, Homo Sapiens
uccuucaaacucagguu

SEQ ID NO: 1426 - RNA, 17 nt, Homo Sapiens
aaacucagguuuguagc

SEQ ID NO: 1427 - RNA, 17 nt, Homo Sapiens
ucagguuuguagcauac

SEQ ID NO: 1428 - RNA, 17 nt, Homo Sapiens
gguuuguagcauacaug

SEQ ID NO: 1429 - RNA, 17 nt, Homo Sapiens
uuuguagcauacaugag

SEQ ID NO: 1430 - RNA, 17 nt, Homo Sapiens
uguagcauacaugaguc

SEQ ID NO: 1431 - RNA, 17 nt, Homo Sapiens
uagcauacaugagucca

SEQ ID NO: 1432 - RNA, 17 nt, Homo Sapiens
auacaugaguccaucca

SEQ ID NO: 1433 - RNA, 17 nt, Homo Sapiens
augaguccauccaucag

SEQ ID NO: 1434 - RNA, 17 nt, Homo Sapiens
guccauccaucagucaa

SEQ ID NO: 1435 - RNA, 17 nt, Homo Sapiens
auccaucagucaaagaa

SEQ ID NO: 1436 - RNA, 17 nt, Homo Sapiens
gucaaagaaugguucca

SEQ ID NO: 1437 - RNA, 17 nt, Homo Sapiens
aaagaaugguuccaucu

SEQ ID NO: 1438 - RNA, 17 nt, Homo Sapiens
augguuccaucuggagu

SEQ ID NO: 1439 - RNA, 17 nt, Homo Sapiens
caucuggagucuuaaug

SEQ ID NO: 1440 - RNA, 17 nt, Homo Sapiens
gagucuuaauguagaaa

SEQ ID NO: 1441 - RNA, 17 nt, Homo Sapiens
gucuuaauguagaaaga

SEQ ID NO: 1442 - RNA, 17 nt, Homo Sapiens
aaagaaaaauggagacu

SEQ ID NO: 1443 - RNA, 17 nt, Homo Sapiens
aaauggagacuuguaau

SEQ ID NO: 1444 - RNA, 17 nt, Homo Sapiens
ggagacuuguaauaaug

SEQ ID NO: 1445 - RNA, 17 nt, Homo Sapiens
gacuuguaauaaugagc

SEQ ID NO: 1446 - RNA, 17 nt, Homo Sapiens
uuguaauaaugagcuag

SEQ ID NO: 1447 - RNA, 17 nt, Homo Sapiens
aauaaugagcuaguuac

SEQ ID NO: 1448 - RNA, 17 nt, Homo Sapiens
augagcuaguuacaaag

SEQ ID NO: 1449 - RNA, 17 nt, Homo Sapiens
agcuaguuacaaagugc

SEQ ID NO: 1450 - RNA, 17 nt, Homo Sapiens
guuacaaagugcuuguu

SEQ ID NO: 1451 - RNA, 17 nt, Homo Sapiens
uacaaagugcuuguuca

SEQ ID NO: 1452 - RNA, 17 nt, Homo Sapiens
aagugcuuguucauuaa

SEQ ID NO: 1453 - RNA, 17 nt, Homo Sapiens
gcuuguucauuaaaaua

SEQ ID NO: 1454 - RNA, 17 nt, Homo Sapiens
ucauuaaaauagcacug

SEQ ID NO: 1455 - RNA, 17 nt, Homo Sapiens
uuaaaauagcacugaaa

SEQ ID NO: 1456 - RNA, 17 nt, Homo Sapiens
aaaauagcacugaaaau

SEQ ID NO: 1457 - RNA, 17 nt, Homo Sapiens
cacugaaaauugaaaca

SEQ ID NO: 1458 - RNA, 17 nt, Homo Sapiens
aaauugaaacaugaauu

SEQ ID NO: 1459 - RNA, 17 nt, Homo Sapiens
auugaaacaugaauuaa

SEQ ID NO: 1460 - RNA, 17 nt, Homo Sapiens
aaacaugaauuaacuga

SEQ ID NO: 1461 - RNA, 17 nt, Homo Sapiens
augaauuaacugauaau

SEQ ID NO: 1462 - RNA, 17 nt, Homo Sapiens
auuaacugauaauauuc

SEQ ID NO: 1463 - RNA, 17 nt, Homo Sapiens
aacugauaauauuccaa

SEQ ID NO: 1464 - RNA, 17 nt, Homo Sapiens
cugauaauauuccaauc

SEQ ID NO: 1465 - RNA, 17 nt, Homo Sapiens
auauuccaaucauuugc

SEQ ID NO: 1466 - RNA, 17 nt, Homo Sapiens
uuccaaucauuugccau

SEQ ID NO: 1467 - RNA, 17 nt, Homo Sapiens
aaucauuugccauuuau

SEQ ID NO: 1468 - RNA, 17 nt, Homo Sapiens
cauuugccauuuaugac

SEQ ID NO: 1469 - RNA, 17 nt, Homo Sapiens
ugccauuuaugacaaaa

SEQ ID NO: 1470 - RNA, 17 nt, Homo Sapiens
cauuuaugacaaaaaug

SEQ ID NO: 1471 - RNA, 17 nt, Homo Sapiens
ugacaaaaaugguuggc

SEQ ID NO: 1472 - RNA, 17 nt, Homo Sapiens
caaaaaugguuggcacu

SEQ ID NO: 1473 - RNA, 17 nt, Homo Sapiens
aaugguuggcacuaaca

SEQ ID NO: 1474 - RNA, 17 nt, Homo Sapiens
ugguuggcacuaacaaa

SEQ ID NO: 1475 - RNA, 17 nt, Homo Sapiens
uggcacuaacaaagaac

SEQ ID NO: 1476 - RNA, 17 nt, Homo Sapiens
aacaaagaacgagcacu

SEQ ID NO: 1477 - RNA, 17 nt, Homo Sapiens
aagaacgagcacuuccu

SEQ ID NO: 1478 - RNA, 17 nt, Homo Sapiens
gaacgagcacuuccuuu

SEQ ID NO: 1479 - RNA, 17 nt, Homo Sapiens
cuuucagaguuucugag

SEQ ID NO: 1480 - RNA, 17 nt, Homo Sapiens
uuucugagauaauguac

SEQ ID NO: 1481 - RNA, 17 nt, Homo Sapiens
cugagauaauguacgug

SEQ ID NO: 1482 - RNA, 17 nt, Homo Sapiens
gagauaauguacgugga

SEQ ID NO: 1483 - RNA, 17 nt, Homo Sapiens
gauaauguacguggaac

SEQ ID NO: 1484 - RNA, 17 nt, Homo Sapiens
uaauguacguggaacag

SEQ ID NO: 1485 - RNA, 17 nt, Homo Sapiens
uacguggaacagucugg

SEQ ID NO: 1486 - RNA, 17 nt, Homo Sapiens
guggaacagucugggug

SEQ ID NO: 1487 - RNA, 17 nt, Homo Sapiens
cagucuggguggaaugg

SEQ ID NO: 1488 - RNA, 17 nt, Homo Sapiens
uggguggaauggggcug

SEQ ID NO: 1489 - RNA, 17 nt, Homo Sapiens
ggaauggggcugaaacc

SEQ ID NO: 1490 - RNA, 17 nt, Homo Sapiens
gggcugaaaccaugugc

SEQ ID NO: 1491 - RNA, 17 nt, Homo Sapiens
cugaaaccaugugcaag

SEQ ID NO: 1492 - RNA, 17 nt, Homo Sapiens
gaaaccaugugcaaguc

SEQ ID NO: 1493 - RNA, 17 nt, Homo Sapiens
aaccaugugcaagucug

SEQ ID NO: 1494 - RNA, 17 nt, Homo Sapiens
augugcaagucuguguc

SEQ ID NO: 1495 - RNA, 17 nt, Homo Sapiens
gcaagucugugucuugu

SEQ ID NO: 1496 - RNA, 17 nt, Homo Sapiens
aagucugugucuuguca

SEQ ID NO: 1497 - RNA, 17 nt, Homo Sapiens
ugugucuugucagucca

SEQ ID NO: 1498 - RNA, 17 nt, Homo Sapiens
ucuugucaguccaagaa

SEQ ID NO: 1499 - RNA, 17 nt, Homo Sapiens
uccaagaagugacaccg

SEQ ID NO: 1500 - RNA, 17 nt, Homo Sapiens
aagaagugacaccgaga

SEQ ID NO: 1501 - RNA, 17 nt, Homo Sapiens
gaagugacaccgagaug

SEQ ID NO: 1502 - RNA, 17 nt, Homo Sapiens
acaccgagauguuaauu

SEQ ID NO: 1503 - RNA, 17 nt, Homo Sapiens
accgagauguuaauuuu

SEQ ID NO: 1504 - RNA, 17 nt, Homo Sapiens
agauguuaauuuuaggg

SEQ ID NO: 1505 - RNA, 17 nt, Homo Sapiens
uuuuagggacccgugcc

SEQ ID NO: 1506 - RNA, 17 nt, Homo Sapiens
agggacccgugccuugu

SEQ ID NO: 1507 - RNA, 17 nt, Homo Sapiens
ggacccgugccuuguuu

SEQ ID NO: 1508 - RNA, 17 nt, Homo Sapiens
cgugccuuguuuccuag

SEQ ID NO: 1509 - RNA, 17 nt, Homo Sapiens
guuuccuagcccacaag

SEQ ID NO: 1510 - RNA, 17 nt, Homo Sapiens
ccuagcccacaagaaug

SEQ ID NO: 1511 - RNA, 17 nt, Homo Sapiens
ccacaagaaugcaaaca

SEQ ID NO: 1512 - RNA, 17 nt, Homo Sapiens
acaagaaugcaaacauc

SEQ ID NO: 1513 - RNA, 17 nt, Homo Sapiens
gaaugcaaacaucaaac

SEQ ID NO: 1514 - RNA, 17 nt, Homo Sapiens
augcaaacaucaaacag

SEQ ID NO: 1515 - RNA, 17 nt, Homo Sapiens
aacaucaaacagauacu

SEQ ID NO: 1516 - RNA, 17 nt, Homo Sapiens
ucaaacagauacucgcu

SEQ ID NO: 1517 - RNA, 17 nt, Homo Sapiens
aaacagauacucgcuag

SEQ ID NO: 1518 - RNA, 17 nt, Homo Sapiens
agauacucgcuagccuc

SEQ ID NO: 1519 - RNA, 17 nt, Homo Sapiens
acucgcuagccucauuu

SEQ ID NO: 1520 - RNA, 17 nt, Homo Sapiens
cuagccucauuuaaauu

SEQ ID NO: 1521 - RNA, 17 nt, Homo Sapiens
ucauuuaaauugauuaa

SEQ ID NO: 1522 - RNA, 17 nt, Homo Sapiens
uuaaauugauuaaagga

SEQ ID NO: 1523 - RNA, 17 nt, Homo Sapiens
aaggaggagugcaucuu

SEQ ID NO: 1524 - RNA, 17 nt, Homo Sapiens
ggaggagugcaucuuug

SEQ ID NO: 1525 - RNA, 17 nt, Homo Sapiens
aggagugcaucuuuggc

SEQ ID NO: 1526 - RNA, 17 nt, Homo Sapiens
caucuuuggccgacagu

SEQ ID NO: 1527 - RNA, 17 nt, Homo Sapiens
uuuggccgacaguggug

SEQ ID NO: 1528 - RNA, 17 nt, Homo Sapiens
ggccgacagugguguaa

SEQ ID NO: 1529 - RNA, 17 nt, Homo Sapiens
cgacagugguguaacug

SEQ ID NO: 1530 - RNA, 17 nt, Homo Sapiens
acagugguguaacugug

SEQ ID NO: 1531 - RNA, 17 nt, Homo Sapiens
gugguguaacugugugu

SEQ ID NO: 1532 - RNA, 17 nt, Homo Sapiens
guguaacugugugugug

SEQ ID NO: 1533 - RNA, 17 nt, Homo Sapiens
guaacugugugugugug

SEQ ID NO: 1534 - RNA, 17 nt, Homo Sapiens
aacugugugugugugug

SEQ ID NO: 1535 - RNA, 17 nt, Homo Sapiens
cugugugugugugugug

SEQ ID NO: 1536 - RNA, 17 nt, Homo Sapiens
gugugugugugugugug

SEQ ID NO: 1537 - RNA, 17 nt, Homo Sapiens
gugugugugugugugug

SEQ ID NO: 1538 - RNA, 17 nt, Homo Sapiens
gugugugugugugugug

SEQ ID NO: 1539 - RNA, 17 nt, Homo Sapiens
gugugugugugugugug

SEQ ID NO: 1540 - RNA, 17 nt, Homo Sapiens
gugugugugugugugug

SEQ ID NO: 1541 - RNA, 17 nt, Homo Sapiens
gugugugugugugugug

SEQ ID NO: 1542 - RNA, 17 nt, Homo Sapiens
gugugugugugugugug

SEQ ID NO: 1543 - RNA, 17 nt, Homo Sapiens
gugugugugugugugug

SEQ ID NO: 1544 - RNA, 17 nt, Homo Sapiens
gugugugugugugugug

SEQ ID NO: 1545 - RNA, 17 nt, Homo Sapiens
gugugugugugugugug

SEQ ID NO: 1546 - RNA, 17 nt, Homo Sapiens
gugugugugugugugug

SEQ ID NO: 1547 - RNA, 17 nt, Homo Sapiens
gugugugugugugugug

SEQ ID NO: 1548 - RNA, 17 nt, Homo Sapiens
gugugugugugugugug

SEQ ID NO: 1549 - RNA, 17 nt, Homo Sapiens
guguguguguguguggg

SEQ ID NO: 1550 - RNA, 17 nt, Homo Sapiens
gugugugugugugggug

SEQ ID NO: 1551 - RNA, 17 nt, Homo Sapiens
gugugugugugggugug

SEQ ID NO: 1552 - RNA, 17 nt, Homo Sapiens
gugugugggugugggug

SEQ ID NO: 1553 - RNA, 17 nt, Homo Sapiens
gugugggugugggugua

SEQ ID NO: 1554 - RNA, 17 nt, Homo Sapiens
ggguguggguguaugug

SEQ ID NO: 1555 - RNA, 17 nt, Homo Sapiens
guguggguguaugugug

SEQ ID NO: 1556 - RNA, 17 nt, Homo Sapiens
guggguguauguguguu

SEQ ID NO: 1557 - RNA, 17 nt, Homo Sapiens
ggguguauguguguuuu

SEQ ID NO: 1558 - RNA, 17 nt, Homo Sapiens
guguauguguguuuugu

SEQ ID NO: 1559 - RNA, 17 nt, Homo Sapiens
guauguguguuuugugc

SEQ ID NO: 1560 - RNA, 17 nt, Homo Sapiens
uguguuuugugcauaac

SEQ ID NO: 1561 - RNA, 17 nt, Homo Sapiens
uguuuugugcauaacua

SEQ ID NO: 1562 - RNA, 17 nt, Homo Sapiens
uuuugugcauaacuauu

SEQ ID NO: 1563 - RNA, 17 nt, Homo Sapiens
ugugcauaacuauuuaa

SEQ ID NO: 1564 - RNA, 17 nt, Homo Sapiens
gcauaacuauuuaagga

SEQ ID NO: 1565 - RNA, 17 nt, Homo Sapiens
uuaaggaaacuggaauu

SEQ ID NO: 1566 - RNA, 17 nt, Homo Sapiens
aaacuggaauuuuaaag

SEQ ID NO: 1567 - RNA, 17 nt, Homo Sapiens
auuuuaaaguuacuuuu

SEQ ID NO: 1568 - RNA, 17 nt, Homo Sapiens
uuaaaguuacuuuuaua

SEQ ID NO: 1569 - RNA, 17 nt, Homo Sapiens
uuacuuuuauacaaacc

SEQ ID NO: 1570 - RNA, 17 nt, Homo Sapiens
acuuuuauacaaaccaa

SEQ ID NO: 1571 - RNA, 17 nt, Homo Sapiens
uuauacaaaccaagaau

SEQ ID NO: 1572 - RNA, 17 nt, Homo Sapiens
aaccaagaauauaugcu

SEQ ID NO: 1573 - RNA, 17 nt, Homo Sapiens
ccaagaauauaugcuac

SEQ ID NO: 1574 - RNA, 17 nt, Homo Sapiens
aagaauauaugcuacag

SEQ ID NO: 1575 - RNA, 17 nt, Homo Sapiens
gaauauaugcuacagau

SEQ ID NO: 1576 - RNA, 17 nt, Homo Sapiens
uauaugcuacagauaua

SEQ ID NO: 1577 - RNA, 17 nt, Homo Sapiens
ugcuacagauauaagac

SEQ ID NO: 1578 - RNA, 17 nt, Homo Sapiens
cuacagauauaagacag

SEQ ID NO: 1579 - RNA, 17 nt, Homo Sapiens
gauauaagacagacaug

SEQ ID NO: 1580 - RNA, 17 nt, Homo Sapiens
uaagacagacaugguuu

SEQ ID NO: 1581 - RNA, 17 nt, Homo Sapiens
agacagacaugguuugg

SEQ ID NO: 1582 - RNA, 17 nt, Homo Sapiens
cagacaugguuuggucc

SEQ ID NO: 1583 - RNA, 17 nt, Homo Sapiens
augguuugguccuauau

SEQ ID NO: 1584 - RNA, 17 nt, Homo Sapiens
uugguccuauauuucua

SEQ ID NO: 1585 - RNA, 17 nt, Homo Sapiens
gguccuauauuucuagu

SEQ ID NO: 1586 - RNA, 17 nt, Homo Sapiens
uauuucuagucaugaug

SEQ ID NO: 1587 - RNA, 17 nt, Homo Sapiens
uucuagucaugaugaau

SEQ ID NO: 1588 - RNA, 17 nt, Homo Sapiens
uagucaugaugaaugua

SEQ ID NO: 1589 - RNA, 17 nt, Homo Sapiens
caugaugaauguauuuu

SEQ ID NO: 1590 - RNA, 17 nt, Homo Sapiens
ugaugaauguauuuugu

SEQ ID NO: 1591 - RNA, 17 nt, Homo Sapiens
augaauguauuuuguau

SEQ ID NO: 1592 - RNA, 17 nt, Homo Sapiens
uguauuuuguauaccau

SEQ ID NO: 1593 - RNA, 17 nt, Homo Sapiens
uauuuuguauaccaucu

SEQ ID NO: 1594 - RNA, 17 nt, Homo Sapiens
uuuuguauaccaucuuc

SEQ ID NO: 1595 - RNA, 17 nt, Homo Sapiens
uguauaccaucuucaua

SEQ ID NO: 1596 - RNA, 17 nt, Homo Sapiens
ccaucuucauauaauau

SEQ ID NO: 1597 - RNA, 17 nt, Homo Sapiens
aucuucauauaauauac

SEQ ID NO: 1598 - RNA, 17 nt, Homo Sapiens
uucauauaauauacuua

SEQ ID NO: 1599 - RNA, 17 nt, Homo Sapiens
cauauaauauacuuaaa

SEQ ID NO: 1600 - RNA, 17 nt, Homo Sapiens
uauaauauacuuaaaaa

SEQ ID NO: 1601 - RNA, 17 nt, Homo Sapiens
acuuaaaaauauuucuu

SEQ ID NO: 1602 - RNA, 17 nt, Homo Sapiens
uuaaaaauauuucuuaa

SEQ ID NO: 1603 - RNA, 17 nt, Homo Sapiens
auuucuuaauugggauu

SEQ ID NO: 1604 - RNA, 17 nt, Homo Sapiens
uaauugggauuuguaau

SEQ ID NO: 1605 - RNA, 17 nt, Homo Sapiens
ugggauuuguaaucgua

SEQ ID NO: 1606 - RNA, 17 nt, Homo Sapiens
gauuuguaaucguacca

SEQ ID NO: 1607 - RNA, 17 nt, Homo Sapiens
uuguaaucguaccaacu

SEQ ID NO: 1608 - RNA, 17 nt, Homo Sapiens
guaaucguaccaacuua

SEQ ID NO: 1609 - RNA, 17 nt, Homo Sapiens
ucguaccaacuuaauug

SEQ ID NO: 1610 - RNA, 17 nt, Homo Sapiens
ccaacuuaauugauaaa

SEQ ID NO: 1611 - RNA, 17 nt, Homo Sapiens
cuuaauugauaaacuug

SEQ ID NO: 1612 - RNA, 17 nt, Homo Sapiens
auugauaaacuuggcaa

SEQ ID NO: 1613 - RNA, 17 nt, Homo Sapiens
uaaacuuggcaacugcu

SEQ ID NO: 1614 - RNA, 17 nt, Homo Sapiens
acuuggcaacugcuuuu

SEQ ID NO: 1615 - RNA, 17 nt, Homo Sapiens
uggcaacugcuuuuaug

SEQ ID NO: 1616 - RNA, 17 nt, Homo Sapiens
cugcuuuuauguucugu

SEQ ID NO: 1617 - RNA, 17 nt, Homo Sapiens
gcuuuuauguucugucu

SEQ ID NO: 1618 - RNA, 17 nt, Homo Sapiens
uauguucugucuccuuc

SEQ ID NO: 1619 - RNA, 17 nt, Homo Sapiens
cuccuuccauaaauuuu

SEQ ID NO: 1620 - RNA, 17 nt, Homo Sapiens
uuccauaaauuuuucaa

SEQ ID NO: 1621 - RNA, 17 nt, Homo Sapiens
uuuucaaaauacuaauu

SEQ ID NO: 1622 - RNA, 17 nt, Homo Sapiens
uucaaaauacuaauuca

SEQ ID NO: 1623 - RNA, 17 nt, Homo Sapiens
aaauacuaauucaacaa

SEQ ID NO: 1624 - RNA, 17 nt, Homo Sapiens
cuaauucaacaaagaaa

SEQ ID NO: 1625 - RNA, 17 nt, Homo Sapiens
aagaaaaagcucuuuuu

SEQ ID NO: 1626 - RNA, 17 nt, Homo Sapiens
uuccuaaaauaaacuca

SEQ ID NO: 1627 - RNA, 17 nt, Homo Sapiens
uaaaauaaacucaaauu

SEQ ID NO: 1628 - RNA, 17 nt, Homo Sapiens
aaacucaaauuuauccu

SEQ ID NO: 1629 - RNA, 17 nt, Homo Sapiens
ucaaauuuauccuuguu

SEQ ID NO: 1630 - RNA, 17 nt, Homo Sapiens
uuauccuuguuuagagc

SEQ ID NO: 1631 - RNA, 17 nt, Homo Sapiens
uguuuagagcagagaaa

SEQ ID NO: 1632 - RNA, 17 nt, Homo Sapiens
agagaaaaauuaagaaa

SEQ ID NO: 1633 - RNA, 17 nt, Homo Sapiens
uaagaaaaacuuugaaa

SEQ ID NO: 1634 - RNA, 17 nt, Homo Sapiens
acuuugaaauggucuca

SEQ ID NO: 1635 - RNA, 17 nt, Homo Sapiens
uugaaauggucucaaaa

SEQ ID NO: 1636 - RNA, 17 nt, Homo Sapiens
cucaaaaaauugcuaaa

SEQ ID NO: 1637 - RNA, 17 nt, Homo Sapiens
aaaaaauugcuaaauau

SEQ ID NO: 1638 - RNA, 17 nt, Homo Sapiens
auugcuaaauauuuuca

SEQ ID NO: 1639 - RNA, 17 nt, Homo Sapiens
ugcuaaauauuuucaau

SEQ ID NO: 1640 - RNA, 17 nt, Homo Sapiens
uauuuucaauggaaaac

SEQ ID NO: 1641 - RNA, 17 nt, Homo Sapiens
aauggaaaacuaaaugu

SEQ ID NO: 1642 - RNA, 17 nt, Homo Sapiens
aaaacuaaauguuaguu

SEQ ID NO: 1643 - RNA, 17 nt, Homo Sapiens
aacuaaauguuaguuua

SEQ ID NO: 1644 - RNA, 17 nt, Homo Sapiens
aaauguuaguuuagcug

SEQ ID NO: 1645 - RNA, 17 nt, Homo Sapiens
uuaguuuagcugauugu

SEQ ID NO: 1646 - RNA, 17 nt, Homo Sapiens
uuuagcugauuguaugg

SEQ ID NO: 1647 - RNA, 17 nt, Homo Sapiens
agcugauuguauggggu

SEQ ID NO: 1648 - RNA, 17 nt, Homo Sapiens
cugauuguaugggguuu

SEQ ID NO: 1649 - RNA, 17 nt, Homo Sapiens
uguaugggguuuucgaa

SEQ ID NO: 1650 - RNA, 17 nt, Homo Sapiens
guuuucgaaccuuucac

SEQ ID NO: 1651 - RNA, 17 nt, Homo Sapiens
aaccuuucacuuuuugu

SEQ ID NO: 1652 - RNA, 17 nt, Homo Sapiens
cacuuuuuguuuguuuu

SEQ ID NO: 1653 - RNA, 17 nt, Homo Sapiens
uuuuguuuguuuuaccu

SEQ ID NO: 1654 - RNA, 17 nt, Homo Sapiens
uuuguuuuaccuauuuc

SEQ ID NO: 1655 - RNA, 17 nt, Homo Sapiens
uuuuaccuauuucacaa

SEQ ID NO: 1656 - RNA, 17 nt, Homo Sapiens
ccuauuucacaacugug

SEQ ID NO: 1657 - RNA, 17 nt, Homo Sapiens
auuucacaacuguguaa

SEQ ID NO: 1658 - RNA, 17 nt, Homo Sapiens
ucacaacuguguaaauu

SEQ ID NO: 1659 - RNA, 17 nt, Homo Sapiens
acaacuguguaaauugc

SEQ ID NO: 1660 - RNA, 17 nt, Homo Sapiens
cuguguaaauugccaau

SEQ ID NO: 1661 - RNA, 17 nt, Homo Sapiens
uguaaauugccaauaau

SEQ ID NO: 1662 - RNA, 17 nt, Homo Sapiens
aauugccaauaauuccu

SEQ ID NO: 1663 - RNA, 17 nt, Homo Sapiens
ugccaauaauuccuguc

SEQ ID NO: 1664 - RNA, 17 nt, Homo Sapiens
uaauuccuguccaugaa

SEQ ID NO: 1665 - RNA, 17 nt, Homo Sapiens
uccuguccaugaaaaug

SEQ ID NO: 1666 - RNA, 17 nt, Homo Sapiens
ccaugaaaaugcaaauu

SEQ ID NO: 1667 - RNA, 17 nt, Homo Sapiens
augaaaaugcaaauuau

SEQ ID NO: 1668 - RNA, 17 nt, Homo Sapiens
aaaugcaaauuauccag

SEQ ID NO: 1669 - RNA, 17 nt, Homo Sapiens
ugcaaauuauccagugu

SEQ ID NO: 1670 - RNA, 17 nt, Homo Sapiens
auuauccaguguagaua

SEQ ID NO: 1671 - RNA, 17 nt, Homo Sapiens
uauccaguguagauaua

SEQ ID NO: 1672 - RNA, 17 nt, Homo Sapiens
caguguagauauauuug

SEQ ID NO: 1673 - RNA, 17 nt, Homo Sapiens
guguagauauauuugac

SEQ ID NO: 1674 - RNA, 17 nt, Homo Sapiens
guagauauauuugacca

SEQ ID NO: 1675 - RNA, 17 nt, Homo Sapiens
uauauuugaccaucacc

SEQ ID NO: 1676 - RNA, 17 nt, Homo Sapiens
auuugaccaucacccua

SEQ ID NO: 1677 - RNA, 17 nt, Homo Sapiens
ugaccaucacccuaugg

SEQ ID NO: 1678 - RNA, 17 nt, Homo Sapiens
aucacccuauggauauu

SEQ ID NO: 1679 - RNA, 17 nt, Homo Sapiens
cccuauggauauuggcu

SEQ ID NO: 1680 - RNA, 17 nt, Homo Sapiens
cuauggauauuggcuag

SEQ ID NO: 1681 - RNA, 17 nt, Homo Sapiens
ggauauuggcuaguuuu

SEQ ID NO: 1682 - RNA, 17 nt, Homo Sapiens
auuggcuaguuuugccu

SEQ ID NO: 1683 - RNA, 17 nt, Homo Sapiens
cuaguuuugccuuuauu

SEQ ID NO: 1684 - RNA, 17 nt, Homo Sapiens
uugccuuuauuaagcaa

SEQ ID NO: 1685 - RNA, 17 nt, Homo Sapiens
uuuauuaagcaaauuca

SEQ ID NO: 1686 - RNA, 17 nt, Homo Sapiens
uuaagcaaauucauuuc

SEQ ID NO: 1687 - RNA, 17 nt, Homo Sapiens
gcaaauucauuucagcc

SEQ ID NO: 1688 - RNA, 17 nt, Homo Sapiens
ucauuucagccugaaug

SEQ ID NO: 1689 - RNA, 17 nt, Homo Sapiens
cagccugaaugucugcc

SEQ ID NO: 1690 - RNA, 17 nt, Homo Sapiens
gccugaaugucugccua

SEQ ID NO: 1691 - RNA, 17 nt, Homo Sapiens
gaaugucugccuauaua

SEQ ID NO: 1692 - RNA, 17 nt, Homo Sapiens
gucugccuauauauucu

SEQ ID NO: 1693 - RNA, 17 nt, Homo Sapiens
cugccuauauauucucu

SEQ ID NO: 1694 - RNA, 17 nt, Homo Sapiens
gccuauauauucucugc

SEQ ID NO: 1695 - RNA, 17 nt, Homo Sapiens
uauucucugcucuuugu

SEQ ID NO: 1696 - RNA, 17 nt, Homo Sapiens
ugcucuuuguauucucc

SEQ ID NO: 1697 - RNA, 17 nt, Homo Sapiens
cucuuuguauucuccuu

SEQ ID NO: 1698 - RNA, 17 nt, Homo Sapiens
uccuuugaacccguuaa

SEQ ID NO: 1699 - RNA, 17 nt, Homo Sapiens
uugaacccguuaaaaca

SEQ ID NO: 1700 - RNA, 17 nt, Homo Sapiens
ccguuaaaacauccugu

SEQ ID NO: 1701 - RNA, 17 nt, Homo Sapiens
guuaaaacauccugugg

SEQ ID NO: 1702 - RNA, 17 nt, Homo Sapiens
aacauccuguggcacuc

SEQ ID NO: 1703 - DNA, 31 bp, Artificial Sequence
  Description of Artificial Sequence:  Enzymatic Nucleic Acid
gggaggagggctagctacaacgacgagagga

SEQ ID NO: 1704 - DNA, 31 bp, Artificial Sequence
  Description of Artificial Sequence:  Enzymatic Nucleic Acid
cgccgctgggctagctacaacgacggggagg

SEQ ID NO: 1705 - DNA, 31 bp, Artificial Sequence
  Description of Artificial Sequence:  Enzymatic Nucleic Acid
cgccgccgggctagctacaacgatgccgggg

SEQ ID NO: 1706 - DNA, 31 bp, Artificial Sequence
  Description of Artificial Sequence:  Enzymatic Nucleic Acid
agccgccgggctagctacaacgacgctgccg

SEQ ID NO: 1707 - DNA, 31 bp, Artificial Sequence
  Description of Artificial Sequence:  Enzymatic Nucleic Acid
ccgagccgggctagctacaacgacgccgctg

SEQ ID NO: 1708 - DNA, 31 bp, Artificial Sequence
  Description of Artificial Sequence:  Enzymatic Nucleic Acid
gctccgagggctagctacaacgacgccgccg

SEQ ID NO: 1709 - DNA, 31 bp, Artificial Sequence
  Description of Artificial Sequence:  Enzymatic Nucleic Acid
ggagcccgggctagctacaacgatccgagcc

SEQ ID NO: 1710 - DNA, 31 bp, Artificial Sequence
  Description of Artificial Sequence:  Enzymatic Nucleic Acid
ccccggagggctagctacaacgaccgctccg

SEQ ID NO: 1711 - DNA, 31 bp, Artificial Sequence
  Description of Artificial Sequence:  Enzymatic Nucleic Acid
cacccgagggctagctacaacgacccggagc

SEQ ID NO: 1712 - DNA, 31 bp, Artificial Sequence
  Description of Artificial Sequence:  Enzymatic Nucleic Acid
ccgctgcaggctagctacaacgaccgagccc

SEQ ID NO: 1713 - DNA, 31 bp, Artificial Sequence
  Description of Artificial Sequence:  Enzymatic Nucleic Acid
ggccgctgggctagctacaacgaacccgagc

SEQ ID NO: 1714 - DNA, 31 bp, Artificial Sequence
  Description of Artificial Sequence:  Enzymatic Nucleic Acid
gctggccgggctagctacaacgatgcacccg

SEQ ID NO: 1715 - DNA, 31 bp, Artificial Sequence
  Description of Artificial Sequence:  Enzymatic Nucleic Acid
cccgctggggctagctacaacgacgctgcac

SEQ ID NO: 1716 - DNA, 31 bp, Artificial Sequence
  Description of Artificial Sequence:  Enzymatic Nucleic Acid
caggcccgggctagctacaacgatggccgct

SEQ ID NO: 1717 - DNA, 31 bp, Artificial Sequence
  Description of Artificial Sequence:  Enzymatic Nucleic Acid
ccgccaggggctagctacaacgaccgctggc

SEQ ID NO: 1718 - DNA, 31 bp, Artificial Sequence
  Description of Artificial Sequence:  Enzymatic Nucleic Acid
cctcgccgggctagctacaacgacaggcccg

SEQ ID NO: 1719 - DNA, 31 bp, Artificial Sequence
  Description of Artificial Sequence:  Enzymatic Nucleic Acid
aatcctcgggctagctacaacgacgccaggc

SEQ ID NO: 1720 - DNA, 31 bp, Artificial Sequence
  Description of Artificial Sequence:  Enzymatic Nucleic Acid
ccgggtaaggctagctacaacgacctcgccg

SEQ ID NO: 1721 - DNA, 31 bp, Artificial Sequence
  Description of Artificial Sequence:  Enzymatic Nucleic Acid
tccccgggggctagctacaacgaaatcctcg

SEQ ID NO: 1722 - DNA, 31 bp, Artificial Sequence
  Description of Artificial Sequence:  Enzymatic Nucleic Acid
gacaaccaggctagctacaacgattccccgg

SEQ ID NO: 1723 - DNA, 31 bp, Artificial Sequence
  Description of Artificial Sequence:  Enzymatic Nucleic Acid
ggagacaaggctagctacaacgacacttccc

SEQ ID NO: 1724 - DNA, 31 bp, Artificial Sequence
  Description of Artificial Sequence:  Enzymatic Nucleic Acid
ccaggagaggctagctacaacgaaaccactt

SEQ ID NO: 1725 - DNA, 31 bp, Artificial Sequence
  Description of Artificial Sequence:  Enzymatic Nucleic Acid
ggctccagggctagctacaacgacaggagac

SEQ ID NO: 1726 - DNA, 31 bp, Artificial Sequence
  Description of Artificial Sequence:  Enzymatic Nucleic Acid
tctcgcggggctagctacaacgatccagcca

SEQ ID NO: 1727 - DNA, 31 bp, Artificial Sequence
  Description of Artificial Sequence:  Enzymatic Nucleic Acid
ccgtctcgggctagctacaacgaggctccag

SEQ ID NO: 1728 - DNA, 31 bp, Artificial Sequence
  Description of Artificial Sequence:  Enzymatic Nucleic Acid
agcgcccgggctagctacaacgactcgcggc

SEQ ID NO: 1729 - DNA, 31 bp, Artificial Sequence
  Description of Artificial Sequence:  Enzymatic Nucleic Acid
cctgagcgggctagctacaacgaccgtctcg

SEQ ID NO: 1730 - DNA, 31 bp, Artificial Sequence
  Description of Artificial Sequence:  Enzymatic Nucleic Acid
gccctgagggctagctacaacgagcccgtct

SEQ ID NO: 1731 - DNA, 31 bp, Artificial Sequence
  Description of Artificial Sequence:  Enzymatic Nucleic Acid
gccccgcgggctagctacaacgacctgagcg

SEQ ID NO: 1732 - DNA, 31 bp, Artificial Sequence
  Description of Artificial Sequence:  Enzymatic Nucleic Acid
cggccccgggctagctacaacgagccctgag

SEQ ID NO: 1733 - DNA, 31 bp, Artificial Sequence
  Description of Artificial Sequence:  Enzymatic Nucleic Acid
gccgccggggctagctacaacgacccgcgcc

SEQ ID NO: 1734 - DNA, 31 bp, Artificial Sequence
  Description of Artificial Sequence:  Enzymatic Nucleic Acid
cgccgccgggctagctacaacgacggccccg

SEQ ID NO: 1735 - DNA, 31 bp, Artificial Sequence
  Description of Artificial Sequence:  Enzymatic Nucleic Acid
gttcgccgggctagctacaacgacgccggcc

SEQ ID NO: 1736 - DNA, 31 bp, Artificial Sequence
  Description of Artificial Sequence:  Enzymatic Nucleic Acid
ctcgttcgggctagctacaacgacgccgccg

SEQ ID NO: 1737 - DNA, 31 bp, Artificial Sequence
  Description of Artificial Sequence:  Enzymatic Nucleic Acid
tcctctcgggctagctacaacgatcgccgcc

SEQ ID NO: 1738 - DNA, 31 bp, Artificial Sequence
  Description of Artificial Sequence:  Enzymatic Nucleic Acid
agagtccgggctagctacaacgacctctcgt

SEQ ID NO: 1739 - DNA, 31 bp, Artificial Sequence
  Description of Artificial Sequence:  Enzymatic Nucleic Acid
cgccagagggctagctacaacgaccgtcctc

SEQ ID NO: 1740 - DNA, 31 bp, Artificial Sequence
  Description of Artificial Sequence:  Enzymatic Nucleic Acid
cccggccgggctagctacaacgacagagtcc

SEQ ID NO: 1741 - DNA, 31 bp, Artificial Sequence
  Description of Artificial Sequence:  Enzymatic Nucleic Acid
cgacccggggctagctacaacgacgccagag

SEQ ID NO: 1742 - DNA, 31 bp, Artificial Sequence
  Description of Artificial Sequence:  Enzymatic Nucleic Acid
gccaacgaggctagctacaacgaccggccgc

SEQ ID NO: 1743 - DNA, 31 bp, Artificial Sequence
  Description of Artificial Sequence:  Enzymatic Nucleic Acid
ccggccaaggctagctacaacgagacccggc

SEQ ID NO: 1744 - DNA, 31 bp, Artificial Sequence
  Description of Artificial Sequence:  Enzymatic Nucleic Acid
tcccccggggctagctacaacgacaacgacc

SEQ ID NO: 1745 - DNA, 31 bp, Artificial Sequence
  Description of Artificial Sequence:  Enzymatic Nucleic Acid
tgcccgcgggctagctacaacgatcccccgg

SEQ ID NO: 1746 - DNA, 31 bp, Artificial Sequence
  Description of Artificial Sequence:  Enzymatic Nucleic Acid
ggtgcccgggctagctacaacgagctccccc

SEQ ID NO: 1747 - DNA, 31 bp, Artificial Sequence
  Description of Artificial Sequence:  Enzymatic Nucleic Acid
gcccggtgggctagctacaacgaccgcgctc

SEQ ID NO: 1748 - DNA, 31 bp, Artificial Sequence
  Description of Artificial Sequence:  Enzymatic Nucleic Acid
tcgcccggggctagctacaacgagcccgcgc

SEQ ID NO: 1749 - DNA, 31 bp, Artificial Sequence
  Description of Artificial Sequence:  Enzymatic Nucleic Acid
cctgctcgggctagctacaacgaccggtgcc

SEQ ID NO: 1750 - DNA, 31 bp, Artificial Sequence
  Description of Artificial Sequence:  Enzymatic Nucleic Acid
gcggcctgggctagctacaacgatcgcccgg

SEQ ID NO: 1751 - DNA, 31 bp, Artificial Sequence
  Description of Artificial Sequence:  Enzymatic Nucleic Acid
cgacgcggggctagctacaacgactgctcgc

SEQ ID NO: 1752 - DNA, 31 bp, Artificial Sequence
  Description of Artificial Sequence:  Enzymatic Nucleic Acid
gcgcgacgggctagctacaacgaggcctgct

SEQ ID NO: 1753 - DNA, 31 bp, Artificial Sequence
  Description of Artificial Sequence:  Enzymatic Nucleic Acid
gagcgcgaggctagctacaacgagcggcctg

SEQ ID NO: 1754 - DNA, 31 bp, Artificial Sequence
  Description of Artificial Sequence:  Enzymatic Nucleic Acid
ggtgagcgggctagctacaacgagacgcggc

SEQ ID NO: 1755 - DNA, 31 bp, Artificial Sequence
  Description of Artificial Sequence:  Enzymatic Nucleic Acid
atggtgagggctagctacaacgagcgacgcg

SEQ ID NO: 1756 - DNA, 31 bp, Artificial Sequence
  Description of Artificial Sequence:  Enzymatic Nucleic Acid
gaccatggggctagctacaacgagagcgcga

SEQ ID NO: 1757 - DNA, 31 bp, Artificial Sequence
  Description of Artificial Sequence:  Enzymatic Nucleic Acid
gctgaccaggctagctacaacgaggtgagcg

SEQ ID NO: 1758 - DNA, 31 bp, Artificial Sequence
  Description of Artificial Sequence:  Enzymatic Nucleic Acid
gtagctgaggctagctacaacgacatggtga

SEQ ID NO: 1759 - DNA, 31 bp, Artificial Sequence
  Description of Artificial Sequence:  Enzymatic Nucleic Acid
cccagtagggctagctacaacgatgaccatg

SEQ ID NO: 1760 - DNA, 31 bp, Artificial Sequence
  Description of Artificial Sequence:  Enzymatic Nucleic Acid
tgtcccagggctagctacaacgaagctgacc

SEQ ID NO: 1761 - DNA, 31 bp, Artificial Sequence
  Description of Artificial Sequence:  Enzymatic Nucleic Acid
ccccggtgggctagctacaacgacccagtag

SEQ ID NO: 1762 - DNA, 31 bp, Artificial Sequence
  Description of Artificial Sequence:  Enzymatic Nucleic Acid
gaccccggggctagctacaacgagtcccagt

SEQ ID NO: 1763 - DNA, 31 bp, Artificial Sequence
  Description of Artificial Sequence:  Enzymatic Nucleic Acid
cagcaggaggctagctacaacgacccggtgt

SEQ ID NO: 1764 - DNA, 31 bp, Artificial Sequence
  Description of Artificial Sequence:  Enzymatic Nucleic Acid
gcgcacagggctagctacaacgaaggacccc

SEQ ID NO: 1765 - DNA, 31 bp, Artificial Sequence
  Description of Artificial Sequence:  Enzymatic Nucleic Acid
agcgcgcaggctagctacaacgaagcaggac

SEQ ID NO: 1766 - DNA, 31 bp, Artificial Sequence
  Description of Artificial Sequence:  Enzymatic Nucleic Acid
gcagcgcgggctagctacaacgaacagcagg

SEQ ID NO: 1767 - DNA, 31 bp, Artificial Sequence
  Description of Artificial Sequence:  Enzymatic Nucleic Acid
gagcagcgggctagctacaacgagcacagca

SEQ ID NO: 1768 - DNA, 31 bp, Artificial Sequence
  Description of Artificial Sequence:  Enzymatic Nucleic Acid
ctgagcagggctagctacaacgagcgcacag

SEQ ID NO: 1769 - DNA, 31 bp, Artificial Sequence
  Description of Artificial Sequence:  Enzymatic Nucleic Acid
cagctgagggctagctacaacgaagcgcgca

SEQ ID NO: 1770 - DNA, 31 bp, Artificial Sequence
  Description of Artificial Sequence:  Enzymatic Nucleic Acid
gcagacagggctagctacaacgatgagcagc

SEQ ID NO: 1771 - DNA, 31 bp, Artificial Sequence
  Description of Artificial Sequence:  Enzymatic Nucleic Acid
gaagcagaggctagctacaacgaagctgagc

SEQ ID NO: 1772 - DNA, 31 bp, Artificial Sequence
  Description of Artificial Sequence:  Enzymatic Nucleic Acid
gtgagaagggctagctacaacgaagacagct

SEQ ID NO: 1773 - DNA, 31 bp, Artificial Sequence
  Description of Artificial Sequence:  Enzymatic Nucleic Acid
agatcctgggctagctacaacgagagaagca

SEQ ID NO: 1774 - DNA, 31 bp, Artificial Sequence
  Description of Artificial Sequence:  Enzymatic Nucleic Acid
gaactagaggctagctacaacgacctgtgag

SEQ ID NO: 1775 - DNA, 31 bp, Artificial Sequence
  Description of Artificial Sequence:  Enzymatic Nucleic Acid
aacctgaaggctagctacaacgatagatcct

SEQ ID NO: 1776 - DNA, 31 bp, Artificial Sequence
  Description of Artificial Sequence:  Enzymatic Nucleic Acid
attttgaaggctagctacaacgactgaacta

SEQ ID NO: 1777 - DNA, 31 bp, Artificial Sequence
  Description of Artificial Sequence:  Enzymatic Nucleic Acid
tcttttaaggctagctacaacgatttgaacc

SEQ ID NO: 1778 - DNA, 31 bp, Artificial Sequence
  Description of Artificial Sequence:  Enzymatic Nucleic Acid
gttcaggaggctagctacaacgacttttaat

SEQ ID NO: 1779 - DNA, 31 bp, Artificial Sequence
  Description of Artificial Sequence:  Enzymatic Nucleic Acid
aaactcagggctagctacaacgatcaggatc

SEQ ID NO: 1780 - DNA, 31 bp, Artificial Sequence
  Description of Artificial Sequence:  Enzymatic Nucleic Acid
cttttaaaggctagctacaacgatcagttca

SEQ ID NO: 1781 - DNA, 31 bp, Artificial Sequence
  Description of Artificial Sequence:  Enzymatic Nucleic Acid
gctgggtgggctagctacaacgacttttaaa

SEQ ID NO: 1782 - DNA, 31 bp, Artificial Sequence
  Description of Artificial Sequence:  Enzymatic Nucleic Acid
gtgctgggggctagctacaacgagcctttta

SEQ ID NO: 1783 - DNA, 31 bp, Artificial Sequence
  Description of Artificial Sequence:  Enzymatic Nucleic Acid
atgatgtgggctagctacaacgatgggtgcc

SEQ ID NO: 1784 - DNA, 31 bp, Artificial Sequence
  Description of Artificial Sequence:  Enzymatic Nucleic Acid
gcatgatgggctagctacaacgagctgggtg

SEQ ID NO: 1785 - DNA, 31 bp, Artificial Sequence
  Description of Artificial Sequence:  Enzymatic Nucleic Acid
ttgcatgaggctagctacaacgagtgctggg

SEQ ID NO: 1786 - DNA, 31 bp, Artificial Sequence
  Description of Artificial Sequence:  Enzymatic Nucleic Acid
tgcttgcaggctagctacaacgagatgtgct

SEQ ID NO: 1787 - DNA, 31 bp, Artificial Sequence
  Description of Artificial Sequence:  Enzymatic Nucleic Acid
cctgcttgggctagctacaacgaatgatgtg

SEQ ID NO: 1788 - DNA, 31 bp, Artificial Sequence
  Description of Artificial Sequence:  Enzymatic Nucleic Acid
ctggcctgggctagctacaacgattgcatga

SEQ ID NO: 1789 - DNA, 31 bp, Artificial Sequence
  Description of Artificial Sequence:  Enzymatic Nucleic Acid
gtgtctggggctagctacaacgactgcttgc

SEQ ID NO: 1790 - DNA, 31 bp, Artificial Sequence
  Description of Artificial Sequence:  Enzymatic Nucleic Acid
atgcagtgggctagctacaacgactggcctg

SEQ ID NO: 1791 - DNA, 31 bp, Artificial Sequence
  Description of Artificial Sequence:  Enzymatic Nucleic Acid
agatgcagggctagctacaacgagtctggcc

SEQ ID NO: 1792 - DNA, 31 bp, Artificial Sequence
  Description of Artificial Sequence:  Enzymatic Nucleic Acid
tggagatgggctagctacaacgaagtgtctg

SEQ ID NO: 1793 - DNA, 31 bp, Artificial Sequence
  Description of Artificial Sequence:  Enzymatic Nucleic Acid
attggagaggctagctacaacgagcagtgtc

SEQ ID NO: 1794 - DNA, 31 bp, Artificial Sequence
  Description of Artificial Sequence:  Enzymatic Nucleic Acid
cccctgcaggctagctacaacgatggagatg

SEQ ID NO: 1795 - DNA, 31 bp, Artificial Sequence
  Description of Artificial Sequence:  Enzymatic Nucleic Acid
cccccctgggctagctacaacgaattggaga

SEQ ID NO: 1796 - DNA, 31 bp, Artificial Sequence
  Description of Artificial Sequence:  Enzymatic Nucleic Acid
atgggctgggctagctacaacgattcccccc

SEQ ID NO: 1797 - DNA, 31 bp, Artificial Sequence
  Description of Artificial Sequence:  Enzymatic Nucleic Acid
tttatgggggctagctacaacgatgcttccc

SEQ ID NO: 1798 - DNA, 31 bp, Artificial Sequence
  Description of Artificial Sequence:  Enzymatic Nucleic Acid
accatttaggctagctacaacgagggctgct

SEQ ID NO: 1799 - DNA, 31 bp, Artificial Sequence
  Description of Artificial Sequence:  Enzymatic Nucleic Acid
aaagaccaggctagctacaacgattatgggc

SEQ ID NO: 1800 - DNA, 31 bp, Artificial Sequence
  Description of Artificial Sequence:  Enzymatic Nucleic Acid
ggcaaagaggctagctacaacgacatttatg

SEQ ID NO: 1801 - DNA, 31 bp, Artificial Sequence
  Description of Artificial Sequence:  Enzymatic Nucleic Acid
atttcaggggctagctacaacgaaaagacca

SEQ ID NO: 1802 - DNA, 31 bp, Artificial Sequence
  Description of Artificial Sequence:  Enzymatic Nucleic Acid
actcaccaggctagctacaacgattcaggca

SEQ ID NO: 1803 - DNA, 31 bp, Artificial Sequence
  Description of Artificial Sequence:  Enzymatic Nucleic Acid
cttactcaggctagctacaacgacatttcag

SEQ ID NO: 1804 - DNA, 31 bp, Artificial Sequence
  Description of Artificial Sequence:  Enzymatic Nucleic Acid
tttccttaggctagctacaacgatcaccatt

SEQ ID NO: 1805 - DNA, 31 bp, Artificial Sequence
  Description of Artificial Sequence:  Enzymatic Nucleic Acid
gcctttcgggctagctacaacgatttcctta

SEQ ID NO: 1806 - DNA, 31 bp, Artificial Sequence
  Description of Artificial Sequence:  Enzymatic Nucleic Acid
atgctcagggctagctacaacgactttcgct

SEQ ID NO: 1807 - DNA, 31 bp, Artificial Sequence
  Description of Artificial Sequence:  Enzymatic Nucleic Acid
tagttatgggctagctacaacgatcagcctt

SEQ ID NO: 1808 - DNA, 31 bp, Artificial Sequence
  Description of Artificial Sequence:  Enzymatic Nucleic Acid
tttagttaggctagctacaacgagctcagcc

SEQ ID NO: 1809 - DNA, 31 bp, Artificial Sequence
  Description of Artificial Sequence:  Enzymatic Nucleic Acid
agatttagggctagctacaacgatatgctca

SEQ ID NO: 1810 - DNA, 31 bp, Artificial Sequence
  Description of Artificial Sequence:  Enzymatic Nucleic Acid
caggcagaggctagctacaacgattagttat

SEQ ID NO: 1811 - DNA, 31 bp, Artificial Sequence
  Description of Artificial Sequence:  Enzymatic Nucleic Acid
tccacaggggctagctacaacgaagatttag

SEQ ID NO: 1812 - DNA, 31 bp, Artificial Sequence
  Description of Artificial Sequence:  Enzymatic Nucleic Acid
ttcttccaggctagctacaacgaaggcagat

SEQ ID NO: 1813 - DNA, 31 bp, Artificial Sequence
  Description of Artificial Sequence:  Enzymatic Nucleic Acid
gtttgccaggctagctacaacgattcttcca

SEQ ID NO: 1814 - DNA, 31 bp, Artificial Sequence
  Description of Artificial Sequence:  Enzymatic Nucleic Acid
attgtttgggctagctacaacgacatttctt

SEQ ID NO: 1815 - DNA, 31 bp, Artificial Sequence
  Description of Artificial Sequence:  Enzymatic Nucleic Acid
cagaattgggctagctacaacgattgccatt

SEQ ID NO: 1816 - DNA, 31 bp, Artificial Sequence
  Description of Artificial Sequence:  Enzymatic Nucleic Acid
ctgcagaaggctagctacaacgatgtttgcc

SEQ ID NO: 1817 - DNA, 31 bp, Artificial Sequence
  Description of Artificial Sequence:  Enzymatic Nucleic Acid
aagtactgggctagctacaacgaagaattgt

SEQ ID NO: 1818 - DNA, 31 bp, Artificial Sequence
  Description of Artificial Sequence:  Enzymatic Nucleic Acid
ttaaagtaggctagctacaacgatgcagaat

SEQ ID NO: 1819 - DNA, 31 bp, Artificial Sequence
  Description of Artificial Sequence:  Enzymatic Nucleic Acid
ggttaaagggctagctacaacgaactgcaga

SEQ ID NO: 1820 - DNA, 31 bp, Artificial Sequence
  Description of Artificial Sequence:  Enzymatic Nucleic Acid
gttcaaggggctagctacaacgataaagtac

SEQ ID NO: 1821 - DNA, 31 bp, Artificial Sequence
  Description of Artificial Sequence:  Enzymatic Nucleic Acid
gagctgtgggctagctacaacgatcaaggtt

SEQ ID NO: 1822 - DNA, 31 bp, Artificial Sequence
  Description of Artificial Sequence:  Enzymatic Nucleic Acid
ttgagctgggctagctacaacgagttcaagg

SEQ ID NO: 1823 - DNA, 31 bp, Artificial Sequence
  Description of Artificial Sequence:  Enzymatic Nucleic Acid
tgcttgagggctagctacaacgatgtgttca

SEQ ID NO: 1824 - DNA, 31 bp, Artificial Sequence
  Description of Artificial Sequence:  Enzymatic Nucleic Acid
gtggtttgggctagctacaacgattgagctg

SEQ ID NO: 1825 - DNA, 31 bp, Artificial Sequence
  Description of Artificial Sequence:  Enzymatic Nucleic Acid
cagtgtggggctagctacaacgattgcttga

SEQ ID NO: 1826 - DNA, 31 bp, Artificial Sequence
  Description of Artificial Sequence:  Enzymatic Nucleic Acid
agccagtgggctagctacaacgaggtttgct

SEQ ID NO: 1827 - DNA, 31 bp, Artificial Sequence
  Description of Artificial Sequence:  Enzymatic Nucleic Acid
gaagccagggctagctacaacgagtggtttg

SEQ ID NO: 1828 - DNA, 31 bp, Artificial Sequence
  Description of Artificial Sequence:  Enzymatic Nucleic Acid
tgtagaagggctagctacaacgacagtgtgg

SEQ ID NO: 1829 - DNA, 31 bp, Artificial Sequence
  Description of Artificial Sequence:  Enzymatic Nucleic Acid
tgcagctgggctagctacaacgaagaagcca

SEQ ID NO: 1830 - DNA, 31 bp, Artificial Sequence
  Description of Artificial Sequence:  Enzymatic Nucleic Acid
atttgcagggctagctacaacgatgtagaag

SEQ ID NO: 1831 - DNA, 31 bp, Artificial Sequence
  Description of Artificial Sequence:  Enzymatic Nucleic Acid
gatatttgggctagctacaacgaagctgtag

SEQ ID NO: 1832 - DNA, 31 bp, Artificial Sequence
  Description of Artificial Sequence:  Enzymatic Nucleic Acid
gctagataggctagctacaacgattgcagct

SEQ ID NO: 1833 - DNA, 31 bp, Artificial Sequence
  Description of Artificial Sequence:  Enzymatic Nucleic Acid
cagctagaggctagctacaacgaatttgcag

SEQ ID NO: 1834 - DNA, 31 bp, Artificial Sequence
  Description of Artificial Sequence:  Enzymatic Nucleic Acid
aggtacagggctagctacaacgatagatatt

SEQ ID NO: 1835 - DNA, 31 bp, Artificial Sequence
  Description of Artificial Sequence:  Enzymatic Nucleic Acid
agtaggtaggctagctacaacgaagctagat

SEQ ID NO: 1836 - DNA, 31 bp, Artificial Sequence
  Description of Artificial Sequence:  Enzymatic Nucleic Acid
gaagtaggggctagctacaacgaacagctag

SEQ ID NO: 1837 - DNA, 31 bp, Artificial Sequence
  Description of Artificial Sequence:  Enzymatic Nucleic Acid
ctttgaagggctagctacaacgaaggtacag

SEQ ID NO: 1838 - DNA, 31 bp, Artificial Sequence
  Description of Artificial Sequence:  Enzymatic Nucleic Acid
agattctgggctagctacaacgattccttct

SEQ ID NO: 1839 - DNA, 31 bp, Artificial Sequence
  Description of Artificial Sequence:  Enzymatic Nucleic Acid
attgcagaggctagctacaacgatctgtttc

SEQ ID NO: 1840 - DNA, 31 bp, Artificial Sequence
  Description of Artificial Sequence:  Enzymatic Nucleic Acid
atagattgggctagctacaacgaagattctg

SEQ ID NO: 1841 - DNA, 31 bp, Artificial Sequence
  Description of Artificial Sequence:  Enzymatic Nucleic Acid
tatatagaggctagctacaacgatgcagatt

SEQ ID NO: 1842 - DNA, 31 bp, Artificial Sequence
  Description of Artificial Sequence:  Enzymatic Nucleic Acid
taaatataggctagctacaacgaagattgca

SEQ ID NO: 1843 - DNA, 31 bp, Artificial Sequence
  Description of Artificial Sequence:  Enzymatic Nucleic Acid
aataaataggctagctacaacgaatagattg

SEQ ID NO: 1844 - DNA, 31 bp, Artificial Sequence
  Description of Artificial Sequence:  Enzymatic Nucleic Acid
ctaataaaggctagctacaacgaatatagat

SEQ ID NO: 1845 - DNA, 31 bp, Artificial Sequence
  Description of Artificial Sequence:  Enzymatic Nucleic Acid
atcactaaggctagctacaacgaaaatatat

SEQ ID NO: 1846 - DNA, 31 bp, Artificial Sequence
  Description of Artificial Sequence:  Enzymatic Nucleic Acid
ctgtatcaggctagctacaacgataataaat

SEQ ID NO: 1847 - DNA, 31 bp, Artificial Sequence
  Description of Artificial Sequence:  Enzymatic Nucleic Acid
tacctgtaggctagctacaacgacactaata

SEQ ID NO: 1848 - DNA, 31 bp, Artificial Sequence
  Description of Artificial Sequence:  Enzymatic Nucleic Acid
tctacctgggctagctacaacgaatcactaa

SEQ ID NO: 1849 - DNA, 31 bp, Artificial Sequence
  Description of Artificial Sequence:  Enzymatic Nucleic Acid
aaggtctaggctagctacaacgactgtatca

SEQ ID NO: 1850 - DNA, 31 bp, Artificial Sequence
  Description of Artificial Sequence:  Enzymatic Nucleic Acid
acgaaaggggctagctacaacgactacctgt

SEQ ID NO: 1851 - DNA, 31 bp, Artificial Sequence
  Description of Artificial Sequence:  Enzymatic Nucleic Acid
catctctaggctagctacaacgagaaaggtc

SEQ ID NO: 1852 - DNA, 31 bp, Artificial Sequence
  Description of Artificial Sequence:  Enzymatic Nucleic Acid
actgtacaggctagctacaacgactctacga

SEQ ID NO: 1853 - DNA, 31 bp, Artificial Sequence
  Description of Artificial Sequence:  Enzymatic Nucleic Acid
tcactgtaggctagctacaacgaatctctac

SEQ ID NO: 1854 - DNA, 31 bp, Artificial Sequence
  Description of Artificial Sequence:  Enzymatic Nucleic Acid
tttcactgggctagctacaacgaacatctct

SEQ ID NO: 1855 - DNA, 31 bp, Artificial Sequence
  Description of Artificial Sequence:  Enzymatic Nucleic Acid
ggatttcaggctagctacaacgatgtacatc

SEQ ID NO: 1856 - DNA, 31 bp, Artificial Sequence
  Description of Artificial Sequence:  Enzymatic Nucleic Acid
ttcggggaggctagctacaacgattcactgt

SEQ ID NO: 1857 - DNA, 31 bp, Artificial Sequence
  Description of Artificial Sequence:  Enzymatic Nucleic Acid
gtgtataaggctagctacaacgattcgggga

SEQ ID NO: 1858 - DNA, 31 bp, Artificial Sequence
  Description of Artificial Sequence:  Enzymatic Nucleic Acid
catgtgtaggctagctacaacgaaatttcgg

SEQ ID NO: 1859 - DNA, 31 bp, Artificial Sequence
  Description of Artificial Sequence:  Enzymatic Nucleic Acid
gtcatgtgggctagctacaacgaataatttc

SEQ ID NO: 1860 - DNA, 31 bp, Artificial Sequence
  Description of Artificial Sequence:  Enzymatic Nucleic Acid
cagtcatgggctagctacaacgagtataatt

SEQ ID NO: 1861 - DNA, 31 bp, Artificial Sequence
  Description of Artificial Sequence:  Enzymatic Nucleic Acid
ttcagtcaggctagctacaacgagtgtataa

SEQ ID NO: 1862 - DNA, 31 bp, Artificial Sequence
  Description of Artificial Sequence:  Enzymatic Nucleic Acid
tccttcagggctagctacaacgacatgtgta

SEQ ID NO: 1863 - DNA, 31 bp, Artificial Sequence
  Description of Artificial Sequence:  Enzymatic Nucleic Acid
atgacgagggctagctacaacgatcccttcc

SEQ ID NO: 1864 - DNA, 31 bp, Artificial Sequence
  Description of Artificial Sequence:  Enzymatic Nucleic Acid
gggaatgaggctagctacaacgagagctccc

SEQ ID NO: 1865 - DNA, 31 bp, Artificial Sequence
  Description of Artificial Sequence:  Enzymatic Nucleic Acid
gcagggaaggctagctacaacgagacgagct

SEQ ID NO: 1866 - DNA, 31 bp, Artificial Sequence
  Description of Artificial Sequence:  Enzymatic Nucleic Acid
taacccggggctagctacaacgaagggaatg

SEQ ID NO: 1867 - DNA, 31 bp, Artificial Sequence
  Description of Artificial Sequence:  Enzymatic Nucleic Acid
tgacgtaaggctagctacaacgaccggcagg

SEQ ID NO: 1868 - DNA, 31 bp, Artificial Sequence
  Description of Artificial Sequence:  Enzymatic Nucleic Acid
aggtgacgggctagctacaacgaaacccggc

SEQ ID NO: 1869 - DNA, 31 bp, Artificial Sequence
  Description of Artificial Sequence:  Enzymatic Nucleic Acid
ttaggtgaggctagctacaacgagtaacccg

SEQ ID NO: 1870 - DNA, 31 bp, Artificial Sequence
  Description of Artificial Sequence:  Enzymatic Nucleic Acid
atgttaggggctagctacaacgagacgtaac

SEQ ID NO: 1871 - DNA, 31 bp, Artificial Sequence
  Description of Artificial Sequence:  Enzymatic Nucleic Acid
cagtgatgggctagctacaacgataggtgac

SEQ ID NO: 1872 - DNA, 31 bp, Artificial Sequence
  Description of Artificial Sequence:  Enzymatic Nucleic Acid
aacagtgaggctagctacaacgagttaggtg

SEQ ID NO: 1873 - DNA, 31 bp, Artificial Sequence
  Description of Artificial Sequence:  Enzymatic Nucleic Acid
agtaacagggctagctacaacgagatgttag

SEQ ID NO: 1874 - DNA, 31 bp, Artificial Sequence
  Description of Artificial Sequence:  Enzymatic Nucleic Acid
taaagtaaggctagctacaacgaagtgatgt

SEQ ID NO: 1875 - DNA, 31 bp, Artificial Sequence
  Description of Artificial Sequence:  Enzymatic Nucleic Acid
ttttaaagggctagctacaacgaaacagtga

SEQ ID NO: 1876 - DNA, 31 bp, Artificial Sequence
  Description of Artificial Sequence:  Enzymatic Nucleic Acid
agtggaaaggctagctacaacgattttttaa

SEQ ID NO: 1877 - DNA, 31 bp, Artificial Sequence
  Description of Artificial Sequence:  Enzymatic Nucleic Acid
gtgtcaagggctagctacaacgaggaaactt

SEQ ID NO: 1878 - DNA, 31 bp, Artificial Sequence
  Description of Artificial Sequence:  Enzymatic Nucleic Acid
tcaaagtgggctagctacaacgacaagtgga

SEQ ID NO: 1879 - DNA, 31 bp, Artificial Sequence
  Description of Artificial Sequence:  Enzymatic Nucleic Acid
gatcaaagggctagctacaacgagtcaagtg

SEQ ID NO: 1880 - DNA, 31 bp, Artificial Sequence
  Description of Artificial Sequence:  Enzymatic Nucleic Acid
atcagggaggctagctacaacgacaaagtgt

SEQ ID NO: 1881 - DNA, 31 bp, Artificial Sequence
  Description of Artificial Sequence:  Enzymatic Nucleic Acid
gttttccaggctagctacaacgacagggatc

SEQ ID NO: 1882 - DNA, 31 bp, Artificial Sequence
  Description of Artificial Sequence:  Enzymatic Nucleic Acid
attatgcgggctagctacaacgatttccatc

SEQ ID NO: 1883 - DNA, 31 bp, Artificial Sequence
  Description of Artificial Sequence:  Enzymatic Nucleic Acid
agattatgggctagctacaacgagttttcca

SEQ ID NO: 1884 - DNA, 31 bp, Artificial Sequence
  Description of Artificial Sequence:  Enzymatic Nucleic Acid
ccagattaggctagctacaacgagcgttttc

SEQ ID NO: 1885 - DNA, 31 bp, Artificial Sequence
  Description of Artificial Sequence:  Enzymatic Nucleic Acid
gtcccagaggctagctacaacgatatgcgtt

SEQ ID NO: 1886 - DNA, 31 bp, Artificial Sequence
  Description of Artificial Sequence:  Enzymatic Nucleic Acid
ttctactgggctagctacaacgacccagatt

SEQ ID NO: 1887 - DNA, 31 bp, Artificial Sequence
  Description of Artificial Sequence:  Enzymatic Nucleic Acid
cctttctaggctagctacaacgatgtcccag

SEQ ID NO: 1888 - DNA, 31 bp, Artificial Sequence
  Description of Artificial Sequence:  Enzymatic Nucleic Acid
tgatgaagggctagctacaacgacctttcta

SEQ ID NO: 1889 - DNA, 31 bp, Artificial Sequence
  Description of Artificial Sequence:  Enzymatic Nucleic Acid
tgatatgaggctagctacaacgagaagccct

SEQ ID NO: 1890 - DNA, 31 bp, Artificial Sequence
  Description of Artificial Sequence:  Enzymatic Nucleic Acid
atttgataggctagctacaacgagatgaagc

SEQ ID NO: 1891 - DNA, 31 bp, Artificial Sequence
  Description of Artificial Sequence:  Enzymatic Nucleic Acid
gcatttgaggctagctacaacgaatgatgaa

SEQ ID NO: 1892 - DNA, 31 bp, Artificial Sequence
  Description of Artificial Sequence:  Enzymatic Nucleic Acid
acgttgcaggctagctacaacgattgatatg

SEQ ID NO: 1893 - DNA, 31 bp, Artificial Sequence
  Description of Artificial Sequence:  Enzymatic Nucleic Acid
gtacgttgggctagctacaacgaatttgata

SEQ ID NO: 1894 - DNA, 31 bp, Artificial Sequence
  Description of Artificial Sequence:  Enzymatic Nucleic Acid
tttgtacgggctagctacaacgatgcatttg

SEQ ID NO: 1895 - DNA, 31 bp, Artificial Sequence
  Description of Artificial Sequence:  Enzymatic Nucleic Acid
tctttgtaggctagctacaacgagttgcatt

SEQ ID NO: 1896 - DNA, 31 bp, Artificial Sequence
  Description of Artificial Sequence:  Enzymatic Nucleic Acid
tttctttgggctagctacaacgaacgttgca

SEQ ID NO: 1897 - DNA, 31 bp, Artificial Sequence
  Description of Artificial Sequence:  Enzymatic Nucleic Acid
aagccctaggctagctacaacgattctttgt

SEQ ID NO: 1898 - DNA, 31 bp, Artificial Sequence
  Description of Artificial Sequence:  Enzymatic Nucleic Acid
gtcagaagggctagctacaacgacctatttc

SEQ ID NO: 1899 - DNA, 31 bp, Artificial Sequence
  Description of Artificial Sequence:  Enzymatic Nucleic Acid
ttcacaggggctagctacaacgacagaagcc

SEQ ID NO: 1900 - DNA, 31 bp, Artificial Sequence
  Description of Artificial Sequence:  Enzymatic Nucleic Acid
ttgcttcaggctagctacaacgaaggtcaga

SEQ ID NO: 1901 - DNA, 31 bp, Artificial Sequence
  Description of Artificial Sequence:  Enzymatic Nucleic Acid
gactgttgggctagctacaacgattcacagg

SEQ ID NO: 1902 - DNA, 31 bp, Artificial Sequence
  Description of Artificial Sequence:  Enzymatic Nucleic Acid
attgactgggctagctacaacgatgcttcac

SEQ ID NO: 1903 - DNA, 31 bp, Artificial Sequence
  Description of Artificial Sequence:  Enzymatic Nucleic Acid
cccattgaggctagctacaacgatgttgctt

SEQ ID NO: 1904 - DNA, 31 bp, Artificial Sequence
  Description of Artificial Sequence:  Enzymatic Nucleic Acid
aatgcccaggctagctacaacgatgactgtt

SEQ ID NO: 1905 - DNA, 31 bp, Artificial Sequence
  Description of Artificial Sequence:  Enzymatic Nucleic Acid
tacaaatgggctagctacaacgaccattgac

SEQ ID NO: 1906 - DNA, 31 bp, Artificial Sequence
  Description of Artificial Sequence:  Enzymatic Nucleic Acid
tatacaaaggctagctacaacgagcccattg

SEQ ID NO: 1907 - DNA, 31 bp, Artificial Sequence
  Description of Artificial Sequence:  Enzymatic Nucleic Acid
gtcttataggctagctacaacgaaaatgccc

SEQ ID NO: 1908 - DNA, 31 bp, Artificial Sequence
  Description of Artificial Sequence:  Enzymatic Nucleic Acid
ttgtcttaggctagctacaacgaacaaatgc

SEQ ID NO: 1909 - DNA, 31 bp, Artificial Sequence
  Description of Artificial Sequence:  Enzymatic Nucleic Acid
atagtttgggctagctacaacgacttataca

SEQ ID NO: 1910 - DNA, 31 bp, Artificial Sequence
  Description of Artificial Sequence:  Enzymatic Nucleic Acid
tgagatagggctagctacaacgattgtctta

SEQ ID NO: 1911 - DNA, 31 bp, Artificial Sequence
  Description of Artificial Sequence:  Enzymatic Nucleic Acid
gtgtgagaggctagctacaacgaagtttgtc

SEQ ID NO: 1912 - DNA, 31 bp, Artificial Sequence
  Description of Artificial Sequence:  Enzymatic Nucleic Acid
tcgatgtgggctagctacaacgagagatagt

SEQ ID NO: 1913 - DNA, 31 bp, Artificial Sequence
  Description of Artificial Sequence:  Enzymatic Nucleic Acid
tgtcgatgggctagctacaacgagtgagata

SEQ ID NO: 1914 - DNA, 31 bp, Artificial Sequence
  Description of Artificial Sequence:  Enzymatic Nucleic Acid
tttgtcgaggctagctacaacgagtgtgaga

SEQ ID NO: 1915 - DNA, 31 bp, Artificial Sequence
  Description of Artificial Sequence:  Enzymatic Nucleic Acid
ttggtttgggctagctacaacgacgatgtgt

SEQ ID NO: 1916 - DNA, 31 bp, Artificial Sequence
  Description of Artificial Sequence:  Enzymatic Nucleic Acid
tgtattggggctagctacaacgattgtcgat

SEQ ID NO: 1917 - DNA, 31 bp, Artificial Sequence
  Description of Artificial Sequence:  Enzymatic Nucleic Acid
tgattgtaggctagctacaacgatggtttgt

SEQ ID NO: 1918 - DNA, 31 bp, Artificial Sequence
  Description of Artificial Sequence:  Enzymatic Nucleic Acid
tatgattgggctagctacaacgaattggttt

SEQ ID NO: 1919 - DNA, 31 bp, Artificial Sequence
  Description of Artificial Sequence:  Enzymatic Nucleic Acid
atctatgaggctagctacaacgatgtattgg

SEQ ID NO: 1920 - DNA, 31 bp, Artificial Sequence
  Description of Artificial Sequence:  Enzymatic Nucleic Acid
gacatctaggctagctacaacgagattgtat

SEQ ID NO: 1921 - DNA, 31 bp, Artificial Sequence
  Description of Artificial Sequence:  Enzymatic Nucleic Acid
tttggacaggctagctacaacgactatgatt

SEQ ID NO: 1922 - DNA, 31 bp, Artificial Sequence
  Description of Artificial Sequence:  Enzymatic Nucleic Acid
tatttggaggctagctacaacgaatctatga

SEQ ID NO: 1923 - DNA, 31 bp, Artificial Sequence
  Description of Artificial Sequence:  Enzymatic Nucleic Acid
tgtgcttaggctagctacaacgattggacat

SEQ ID NO: 1924 - DNA, 31 bp, Artificial Sequence
  Description of Artificial Sequence:  Enzymatic Nucleic Acid
gtggtgtgggctagctacaacgattatttgg

SEQ ID NO: 1925 - DNA, 31 bp, Artificial Sequence
  Description of Artificial Sequence:  Enzymatic Nucleic Acid
gcgtggtgggctagctacaacgagcttattt

SEQ ID NO: 1926 - DNA, 31 bp, Artificial Sequence
  Description of Artificial Sequence:  Enzymatic Nucleic Acid
gggcgtggggctagctacaacgagtgcttat

SEQ ID NO: 1927 - DNA, 31 bp, Artificial Sequence
  Description of Artificial Sequence:  Enzymatic Nucleic Acid
actgggcgggctagctacaacgaggtgtgct

SEQ ID NO: 1928 - DNA, 31 bp, Artificial Sequence
  Description of Artificial Sequence:  Enzymatic Nucleic Acid
tgactgggggctagctacaacgagtggtgtg

SEQ ID NO: 1929 - DNA, 31 bp, Artificial Sequence
  Description of Artificial Sequence:  Enzymatic Nucleic Acid
taatttgaggctagctacaacgatgggcgtg

SEQ ID NO: 1930 - DNA, 31 bp, Artificial Sequence
  Description of Artificial Sequence:  Enzymatic Nucleic Acid
ctaagtaaggctagctacaacgattgactgg

SEQ ID NO: 1931 - DNA, 31 bp, Artificial Sequence
  Description of Artificial Sequence:  Enzymatic Nucleic Acid
cctctaagggctagctacaacgaaatttgac

SEQ ID NO: 1932 - DNA, 31 bp, Artificial Sequence
  Description of Artificial Sequence:  Enzymatic Nucleic Acid
gagtatggggctagctacaacgactctaagt

SEQ ID NO: 1933 - DNA, 31 bp, Artificial Sequence
  Description of Artificial Sequence:  Enzymatic Nucleic Acid
caagagtaggctagctacaacgaggcctcta

SEQ ID NO: 1934 - DNA, 31 bp, Artificial Sequence
  Description of Artificial Sequence:  Enzymatic Nucleic Acid
gacaagagggctagctacaacgaatggcctc

SEQ ID NO: 1935 - DNA, 31 bp, Artificial Sequence
  Description of Artificial Sequence:  Enzymatic Nucleic Acid
attgaggaggctagctacaacgaaagagtat

SEQ ID NO: 1936 - DNA, 31 bp, Artificial Sequence
  Description of Artificial Sequence:  Enzymatic Nucleic Acid
cagtacaaggctagctacaacgatgaggaca

SEQ ID NO: 1937 - DNA, 31 bp, Artificial Sequence
  Description of Artificial Sequence:  Enzymatic Nucleic Acid
tagcagtaggctagctacaacgaaattgagg

SEQ ID NO: 1938 - DNA, 31 bp, Artificial Sequence
  Description of Artificial Sequence:  Enzymatic Nucleic Acid
ggtagcagggctagctacaacgaacaattga

SEQ ID NO: 1939 - DNA, 31 bp, Artificial Sequence
  Description of Artificial Sequence:  Enzymatic Nucleic Acid
agtggtagggctagctacaacgaagtacaat

SEQ ID NO: 1940 - DNA, 31 bp, Artificial Sequence
  Description of Artificial Sequence:  Enzymatic Nucleic Acid
gggagtggggctagctacaacgaagcagtac

SEQ ID NO: 1941 - DNA, 31 bp, Artificial Sequence
  Description of Artificial Sequence:  Enzymatic Nucleic Acid
caagggagggctagctacaacgaggtagcag

SEQ ID NO: 1942 - DNA, 31 bp, Artificial Sequence
  Description of Artificial Sequence:  Enzymatic Nucleic Acid
ctctcgtgggctagctacaacgatcaaggga

SEQ ID NO: 1943 - DNA, 31 bp, Artificial Sequence
  Description of Artificial Sequence:  Enzymatic Nucleic Acid
aactctcgggctagctacaacgagttcaagg

SEQ ID NO: 1944 - DNA, 31 bp, Artificial Sequence
  Description of Artificial Sequence:  Enzymatic Nucleic Acid
catttgaaggctagctacaacgatctcgtgt

SEQ ID NO: 1945 - DNA, 31 bp, Artificial Sequence
  Description of Artificial Sequence:  Enzymatic Nucleic Acid
ccaggtcaggctagctacaacgattgaactc

SEQ ID NO: 1946 - DNA, 31 bp, Artificial Sequence
  Description of Artificial Sequence:  Enzymatic Nucleic Acid
actccaggggctagctacaacgacatttgaa

SEQ ID NO: 1947 - DNA, 31 bp, Artificial Sequence
  Description of Artificial Sequence:  Enzymatic Nucleic Acid
cagggtaaggctagctacaacgatccaggtc

SEQ ID NO: 1948 - DNA, 31 bp, Artificial Sequence
  Description of Artificial Sequence:  Enzymatic Nucleic Acid
catcagggggctagctacaacgaaactccag

SEQ ID NO: 1949 - DNA, 31 bp, Artificial Sequence
  Description of Artificial Sequence:  Enzymatic Nucleic Acid
ttttttcaggctagctacaacgacagggtaa

SEQ ID NO: 1950 - DNA, 31 bp, Artificial Sequence
  Description of Artificial Sequence:  Enzymatic Nucleic Acid
ctctcttaggctagctacaacgattttttca

SEQ ID NO: 1951 - DNA, 31 bp, Artificial Sequence
  Description of Artificial Sequence:  Enzymatic Nucleic Acid
tacggaagggctagctacaacgatctcttat

SEQ ID NO: 1952 - DNA, 31 bp, Artificial Sequence
  Description of Artificial Sequence:  Enzymatic Nucleic Acid
tcgccttaggctagctacaacgaggaagctc

SEQ ID NO: 1953 - DNA, 31 bp, Artificial Sequence
  Description of Artificial Sequence:  Enzymatic Nucleic Acid
attcgtcgggctagctacaacgacttacgga

SEQ ID NO: 1954 - DNA, 31 bp, Artificial Sequence
  Description of Artificial Sequence:  Enzymatic Nucleic Acid
tcaattcgggctagctacaacgacgccttac

SEQ ID NO: 1955 - DNA, 31 bp, Artificial Sequence
  Description of Artificial Sequence:  Enzymatic Nucleic Acid
ttggtcaaggctagctacaacgatcgtcgcc

SEQ ID NO: 1956 - DNA, 31 bp, Artificial Sequence
  Description of Artificial Sequence:  Enzymatic Nucleic Acid
tgctttggggctagctacaacgacaattcgt

SEQ ID NO: 1957 - DNA, 31 bp, Artificial Sequence
  Description of Artificial Sequence:  Enzymatic Nucleic Acid
gggaattgggctagctacaacgatttggtca

SEQ ID NO: 1958 - DNA, 31 bp, Artificial Sequence
  Description of Artificial Sequence:  Enzymatic Nucleic Acid
catgggaaggctagctacaacgatgctttgg

SEQ ID NO: 1959 - DNA, 31 bp, Artificial Sequence
  Description of Artificial Sequence:  Enzymatic Nucleic Acid
tgttggcaggctagctacaacgagggaattg

SEQ ID NO: 1960 - DNA, 31 bp, Artificial Sequence
  Description of Artificial Sequence:  Enzymatic Nucleic Acid
tatgttggggctagctacaacgaatgggaat

SEQ ID NO: 1961 - DNA, 31 bp, Artificial Sequence
  Description of Artificial Sequence:  Enzymatic Nucleic Acid
agaatatgggctagctacaacgatggcatgg

SEQ ID NO: 1962 - DNA, 31 bp, Artificial Sequence
  Description of Artificial Sequence:  Enzymatic Nucleic Acid
gtagaataggctagctacaacgagttggcat

SEQ ID NO: 1963 - DNA, 31 bp, Artificial Sequence
  Description of Artificial Sequence:  Enzymatic Nucleic Acid
ctgtagaaggctagctacaacgaatgttggc

SEQ ID NO: 1964 - DNA, 31 bp, Artificial Sequence
  Description of Artificial Sequence:  Enzymatic Nucleic Acid
gaacactgggctagctacaacgaagaatatg

SEQ ID NO: 1965 - DNA, 31 bp, Artificial Sequence
  Description of Artificial Sequence:  Enzymatic Nucleic Acid
taagaacaggctagctacaacgatgtagaat

SEQ ID NO: 1966 - DNA, 31 bp, Artificial Sequence
  Description of Artificial Sequence:  Enzymatic Nucleic Acid
agtaagaaggctagctacaacgaactgtaga

SEQ ID NO: 1967 - DNA, 31 bp, Artificial Sequence
  Description of Artificial Sequence:  Enzymatic Nucleic Acid
gtcaatagggctagctacaacgaaagaacac

SEQ ID NO: 1968 - DNA, 31 bp, Artificial Sequence
  Description of Artificial Sequence:  Enzymatic Nucleic Acid
tttgtcaaggctagctacaacgaagtaagaa

SEQ ID NO: 1969 - DNA, 31 bp, Artificial Sequence
  Description of Artificial Sequence:  Enzymatic Nucleic Acid
gcattttgggctagctacaacgacaatagta

SEQ ID NO: 1970 - DNA, 31 bp, Artificial Sequence
  Description of Artificial Sequence:  Enzymatic Nucleic Acid
gttctgcaggctagctacaacgatttgtcaa

SEQ ID NO: 1971 - DNA, 31 bp, Artificial Sequence
  Description of Artificial Sequence:  Enzymatic Nucleic Acid
ttgttctgggctagctacaacgaattttgtc

SEQ ID NO: 1972 - DNA, 31 bp, Artificial Sequence
  Description of Artificial Sequence:  Enzymatic Nucleic Acid
tgtctttgggctagctacaacgatctgcatt

SEQ ID NO: 1973 - DNA, 31 bp, Artificial Sequence
  Description of Artificial Sequence:  Enzymatic Nucleic Acid
gtcctttgggctagctacaacgactttgttc

SEQ ID NO: 1974 - DNA, 31 bp, Artificial Sequence
  Description of Artificial Sequence:  Enzymatic Nucleic Acid
gtataaagggctagctacaacgacctttgtc

SEQ ID NO: 1975 - DNA, 31 bp, Artificial Sequence
  Description of Artificial Sequence:  Enzymatic Nucleic Acid
gacaagtaggctagctacaacgaaaagtcct

SEQ ID NO: 1976 - DNA, 31 bp, Artificial Sequence
  Description of Artificial Sequence:  Enzymatic Nucleic Acid
acgacaagggctagctacaacgaataaagtc

SEQ ID NO: 1977 - DNA, 31 bp, Artificial Sequence
  Description of Artificial Sequence:  Enzymatic Nucleic Acid
ttacacgaggctagctacaacgaaagtataa

SEQ ID NO: 1978 - DNA, 31 bp, Artificial Sequence
  Description of Artificial Sequence:  Enzymatic Nucleic Acid
tccttacaggctagctacaacgagacaagta

SEQ ID NO: 1979 - DNA, 31 bp, Artificial Sequence
  Description of Artificial Sequence:  Enzymatic Nucleic Acid
actccttaggctagctacaacgaacgacaag

SEQ ID NO: 1980 - DNA, 31 bp, Artificial Sequence
  Description of Artificial Sequence:  Enzymatic Nucleic Acid
atggtccaggctagctacaacgatccttaca

SEQ ID NO: 1981 - DNA, 31 bp, Artificial Sequence
  Description of Artificial Sequence:  Enzymatic Nucleic Acid
aatgatggggctagctacaacgaccactcct

SEQ ID NO: 1982 - DNA, 31 bp, Artificial Sequence
  Description of Artificial Sequence:  Enzymatic Nucleic Acid
ttgaatgaggctagctacaacgaggtccact

SEQ ID NO: 1983 - DNA, 31 bp, Artificial Sequence
  Description of Artificial Sequence:  Enzymatic Nucleic Acid
gatttgaaggctagctacaacgagatggtcc

SEQ ID NO: 1984 - DNA, 31 bp, Artificial Sequence
  Description of Artificial Sequence:  Enzymatic Nucleic Acid
ttaacagaggctagctacaacgattgaatga

SEQ ID NO: 1985 - DNA, 31 bp, Artificial Sequence
  Description of Artificial Sequence:  Enzymatic Nucleic Acid
ggtgttaaggctagctacaacgaagatttga

SEQ ID NO: 1986 - DNA, 31 bp, Artificial Sequence
  Description of Artificial Sequence:  Enzymatic Nucleic Acid
ctgaggtgggctagctacaacgataacagat

SEQ ID NO: 1987 - DNA, 31 bp, Artificial Sequence
  Description of Artificial Sequence:  Enzymatic Nucleic Acid
cactgaggggctagctacaacgagttaacag

SEQ ID NO: 1988 - DNA, 31 bp, Artificial Sequence
  Description of Artificial Sequence:  Enzymatic Nucleic Acid
tatatgcaggctagctacaacgatgaggtgt

SEQ ID NO: 1989 - DNA, 31 bp, Artificial Sequence
  Description of Artificial Sequence:  Enzymatic Nucleic Acid
tatatatgggctagctacaacgaactgaggt

SEQ ID NO: 1990 - DNA, 31 bp, Artificial Sequence
  Description of Artificial Sequence:  Enzymatic Nucleic Acid
catatataggctagctacaacgagcactgag

SEQ ID NO: 1991 - DNA, 31 bp, Artificial Sequence
  Description of Artificial Sequence:  Enzymatic Nucleic Acid
atcatataggctagctacaacgaatgcactg

SEQ ID NO: 1992 - DNA, 31 bp, Artificial Sequence
  Description of Artificial Sequence:  Enzymatic Nucleic Acid
ttatcataggctagctacaacgaatatgcac

SEQ ID NO: 1993 - DNA, 31 bp, Artificial Sequence
  Description of Artificial Sequence:  Enzymatic Nucleic Acid
ctttatcaggctagctacaacgaatatatgc

SEQ ID NO: 1994 - DNA, 31 bp, Artificial Sequence
  Description of Artificial Sequence:  Enzymatic Nucleic Acid
atgctttaggctagctacaacgacatatata

SEQ ID NO: 1995 - DNA, 31 bp, Artificial Sequence
  Description of Artificial Sequence:  Enzymatic Nucleic Acid
gatgaatgggctagctacaacgatttatcat

SEQ ID NO: 1996 - DNA, 31 bp, Artificial Sequence
  Description of Artificial Sequence:  Enzymatic Nucleic Acid
gtgatgaaggctagctacaacgagctttatc

SEQ ID NO: 1997 - DNA, 31 bp, Artificial Sequence
  Description of Artificial Sequence:  Enzymatic Nucleic Acid
cacagtgaggctagctacaacgagaatgctt

SEQ ID NO: 1998 - DNA, 31 bp, Artificial Sequence
  Description of Artificial Sequence:  Enzymatic Nucleic Acid
tttcacagggctagctacaacgagatgaatg

SEQ ID NO: 1999 - DNA, 31 bp, Artificial Sequence
  Description of Artificial Sequence:  Enzymatic Nucleic Acid
atgtttcaggctagctacaacgaagtgatga

SEQ ID NO: 2000 - DNA, 31 bp, Artificial Sequence
  Description of Artificial Sequence:  Enzymatic Nucleic Acid
tttcgatgggctagctacaacgattcacagt

SEQ ID NO: 2001 - DNA, 31 bp, Artificial Sequence
  Description of Artificial Sequence:  Enzymatic Nucleic Acid
gttttcgaggctagctacaacgagtttcaca

SEQ ID NO: 2002 - DNA, 31 bp, Artificial Sequence
  Description of Artificial Sequence:  Enzymatic Nucleic Acid
acctgctgggctagctacaacgatttcgatg

SEQ ID NO: 2003 - DNA, 31 bp, Artificial Sequence
  Description of Artificial Sequence:  Enzymatic Nucleic Acid
agcacctgggctagctacaacgatgttttcg

SEQ ID NO: 2004 - DNA, 31 bp, Artificial Sequence
  Description of Artificial Sequence:  Enzymatic Nucleic Acid
ttcaagcaggctagctacaacgactgctgtt

SEQ ID NO: 2005 - DNA, 31 bp, Artificial Sequence
  Description of Artificial Sequence:  Enzymatic Nucleic Acid
gtttcaagggctagctacaacgaacctgctg

SEQ ID NO: 2006 - DNA, 31 bp, Artificial Sequence
  Description of Artificial Sequence:  Enzymatic Nucleic Acid
agctacggggctagctacaacgattcaagca

SEQ ID NO: 2007 - DNA, 31 bp, Artificial Sequence
  Description of Artificial Sequence:  Enzymatic Nucleic Acid
gccagctaggctagctacaacgaggtttcaa

SEQ ID NO: 2008 - DNA, 31 bp, Artificial Sequence
  Description of Artificial Sequence:  Enzymatic Nucleic Acid
cttgccagggctagctacaacgatacggttt

SEQ ID NO: 2009 - DNA, 31 bp, Artificial Sequence
  Description of Artificial Sequence:  Enzymatic Nucleic Acid
accgcttgggctagctacaacgacagctacg

SEQ ID NO: 2010 - DNA, 31 bp, Artificial Sequence
  Description of Artificial Sequence:  Enzymatic Nucleic Acid
taagaccgggctagctacaacgattgccagc

SEQ ID NO: 2011 - DNA, 31 bp, Artificial Sequence
  Description of Artificial Sequence:  Enzymatic Nucleic Acid
cggtaagaggctagctacaacgacgcttgcc

SEQ ID NO: 2012 - DNA, 31 bp, Artificial Sequence
  Description of Artificial Sequence:  Enzymatic Nucleic Acid
agagccggggctagctacaacgaaagaccgc

SEQ ID NO: 2013 - DNA, 31 bp, Artificial Sequence
  Description of Artificial Sequence:  Enzymatic Nucleic Acid
atagagagggctagctacaacgacggtaaga

SEQ ID NO: 2014 - DNA, 31 bp, Artificial Sequence
  Description of Artificial Sequence:  Enzymatic Nucleic Acid
cactttcaggctagctacaacgaagagagcc

SEQ ID NO: 2015 - DNA, 31 bp, Artificial Sequence
  Description of Artificial Sequence:  Enzymatic Nucleic Acid
tgccttcaggctagctacaacgatttcatag

SEQ ID NO: 2016 - DNA, 31 bp, Artificial Sequence
  Description of Artificial Sequence:  Enzymatic Nucleic Acid
gggaaatgggctagctacaacgacttcactt

SEQ ID NO: 2017 - DNA, 31 bp, Artificial Sequence
  Description of Artificial Sequence:  Enzymatic Nucleic Acid
gagggaaaggctagctacaacgagccttcac

SEQ ID NO: 2018 - DNA, 31 bp, Artificial Sequence
  Description of Artificial Sequence:  Enzymatic Nucleic Acid
acttccggggctagctacaacgagagggaaa

SEQ ID NO: 2019 - DNA, 31 bp, Artificial Sequence
  Description of Artificial Sequence:  Enzymatic Nucleic Acid
ccatacaaggctagctacaacgattccggcg

SEQ ID NO: 2020 - DNA, 31 bp, Artificial Sequence
  Description of Artificial Sequence:  Enzymatic Nucleic Acid
taaccataggctagctacaacgaaacttccg

SEQ ID NO: 2021 - DNA, 31 bp, Artificial Sequence
  Description of Artificial Sequence:  Enzymatic Nucleic Acid
tttaaccaggctagctacaacgaacaacttc

SEQ ID NO: 2022 - DNA, 31 bp, Artificial Sequence
  Description of Artificial Sequence:  Enzymatic Nucleic Acid
tcttttaaggctagctacaacgacatacaac

SEQ ID NO: 2023 - DNA, 31 bp, Artificial Sequence
  Description of Artificial Sequence:  Enzymatic Nucleic Acid
gtaacccaggctagctacaacgacttttaac

SEQ ID NO: 2024 - DNA, 31 bp, Artificial Sequence
  Description of Artificial Sequence:  Enzymatic Nucleic Acid
gcaggtaaggctagctacaacgaccatcttt

SEQ ID NO: 2025 - DNA, 31 bp, Artificial Sequence
  Description of Artificial Sequence:  Enzymatic Nucleic Acid
gtcgcaggggctagctacaacgaaacccatc

SEQ ID NO: 2026 - DNA, 31 bp, Artificial Sequence
  Description of Artificial Sequence:  Enzymatic Nucleic Acid
ctcagtcgggctagctacaacgaaggtaacc

SEQ ID NO: 2027 - DNA, 31 bp, Artificial Sequence
  Description of Artificial Sequence:  Enzymatic Nucleic Acid
tttctcagggctagctacaacgacgcaggta

SEQ ID NO: 2028 - DNA, 31 bp, Artificial Sequence
  Description of Artificial Sequence:  Enzymatic Nucleic Acid
cgagcagaggctagctacaacgattctcagt

SEQ ID NO: 2029 - DNA, 31 bp, Artificial Sequence
  Description of Artificial Sequence:  Enzymatic Nucleic Acid
atagcgagggctagctacaacgaagatttct

SEQ ID NO: 2030 - DNA, 31 bp, Artificial Sequence
  Description of Artificial Sequence:  Enzymatic Nucleic Acid
tcaaatagggctagctacaacgagagcagat

SEQ ID NO: 2031 - DNA, 31 bp, Artificial Sequence
  Description of Artificial Sequence:  Enzymatic Nucleic Acid
gagtcaaaggctagctacaacgaagcgagca

SEQ ID NO: 2032 - DNA, 31 bp, Artificial Sequence
  Description of Artificial Sequence:  Enzymatic Nucleic Acid
gccacgagggctagctacaacgacaaatagc

SEQ ID NO: 2033 - DNA, 31 bp, Artificial Sequence
  Description of Artificial Sequence:  Enzymatic Nucleic Acid
agtagccaggctagctacaacgagagtcaaa

SEQ ID NO: 2034 - DNA, 31 bp, Artificial Sequence
  Description of Artificial Sequence:  Enzymatic Nucleic Acid
acgagtagggctagctacaacgacacgagtc

SEQ ID NO: 2035 - DNA, 31 bp, Artificial Sequence
  Description of Artificial Sequence:  Enzymatic Nucleic Acid
ttaacgagggctagctacaacgaagccacga

SEQ ID NO: 2036 - DNA, 31 bp, Artificial Sequence
  Description of Artificial Sequence:  Enzymatic Nucleic Acid
ataattaaggctagctacaacgagagtagcc

SEQ ID NO: 2037 - DNA, 31 bp, Artificial Sequence
  Description of Artificial Sequence:  Enzymatic Nucleic Acid
cttgataaggctagctacaacgataacgagt

SEQ ID NO: 2038 - DNA, 31 bp, Artificial Sequence
  Description of Artificial Sequence:  Enzymatic Nucleic Acid
gtccttgaggctagctacaacgaaattaacg

SEQ ID NO: 2039 - DNA, 31 bp, Artificial Sequence
  Description of Artificial Sequence:  Enzymatic Nucleic Acid
cagttacgggctagctacaacgaccttgata

SEQ ID NO: 2040 - DNA, 31 bp, Artificial Sequence
  Description of Artificial Sequence:  Enzymatic Nucleic Acid
ttcagttaggctagctacaacgagtccttga

SEQ ID NO: 2041 - DNA, 31 bp, Artificial Sequence
  Description of Artificial Sequence:  Enzymatic Nucleic Acid
ctcttcagggctagctacaacgatacgtcct

SEQ ID NO: 2042 - DNA, 31 bp, Artificial Sequence
  Description of Artificial Sequence:  Enzymatic Nucleic Acid
tccctgcaggctagctacaacgacctcttca

SEQ ID NO: 2043 - DNA, 31 bp, Artificial Sequence
  Description of Artificial Sequence:  Enzymatic Nucleic Acid
attccctgggctagctacaacgaatcctctt

SEQ ID NO: 2044 - DNA, 31 bp, Artificial Sequence
  Description of Artificial Sequence:  Enzymatic Nucleic Acid
ttgtataaggctagctacaacgatccctgca

SEQ ID NO: 2045 - DNA, 31 bp, Artificial Sequence
  Description of Artificial Sequence:  Enzymatic Nucleic Acid
agattgtaggctagctacaacgaaattccct

SEQ ID NO: 2046 - DNA, 31 bp, Artificial Sequence
  Description of Artificial Sequence:  Enzymatic Nucleic Acid
caagattgggctagctacaacgaataattcc

SEQ ID NO: 2047 - DNA, 31 bp, Artificial Sequence
  Description of Artificial Sequence:  Enzymatic Nucleic Acid
cagcaagaggctagctacaacgatgtataat

SEQ ID NO: 2048 - DNA, 31 bp, Artificial Sequence
  Description of Artificial Sequence:  Enzymatic Nucleic Acid
atgctcagggctagctacaacgaaagattgt

SEQ ID NO: 2049 - DNA, 31 bp, Artificial Sequence
  Description of Artificial Sequence:  Enzymatic Nucleic Acid
gttttatgggctagctacaacgatcagcaag

SEQ ID NO: 2050 - DNA, 31 bp, Artificial Sequence
  Description of Artificial Sequence:  Enzymatic Nucleic Acid
ctgttttaggctagctacaacgagctcagca

SEQ ID NO: 2051 - DNA, 31 bp, Artificial Sequence
  Description of Artificial Sequence:  Enzymatic Nucleic Acid
tttgactgggctagctacaacgatttatgct

SEQ ID NO: 2052 - DNA, 31 bp, Artificial Sequence
  Description of Artificial Sequence:  Enzymatic Nucleic Acid
acatttgaggctagctacaacgatgttttat

SEQ ID NO: 2053 - DNA, 31 bp, Artificial Sequence
  Description of Artificial Sequence:  Enzymatic Nucleic Acid
taaacacaggctagctacaacgattgactgt

SEQ ID NO: 2054 - DNA, 31 bp, Artificial Sequence
  Description of Artificial Sequence:  Enzymatic Nucleic Acid
tttaaacaggctagctacaacgaatttgact

SEQ ID NO: 2055 - DNA, 31 bp, Artificial Sequence
  Description of Artificial Sequence:  Enzymatic Nucleic Acid
tttttaaaggctagctacaacgaacatttga

SEQ ID NO: 2056 - DNA, 31 bp, Artificial Sequence
  Description of Artificial Sequence:  Enzymatic Nucleic Acid
cagtgaggggctagctacaacgattttaaac

SEQ ID NO: 2057 - DNA, 31 bp, Artificial Sequence
  Description of Artificial Sequence:  Enzymatic Nucleic Acid
agtggcagggctagctacaacgagaggtttt

SEQ ID NO: 2058 - DNA, 31 bp, Artificial Sequence
  Description of Artificial Sequence:  Enzymatic Nucleic Acid
tagagtggggctagctacaacgaagtgaggt

SEQ ID NO: 2059 - DNA, 31 bp, Artificial Sequence
  Description of Artificial Sequence:  Enzymatic Nucleic Acid
aattagagggctagctacaacgaggcagtga

SEQ ID NO: 2060 - DNA, 31 bp, Artificial Sequence
  Description of Artificial Sequence:  Enzymatic Nucleic Acid
attgacaaggctagctacaacgatagagtgg

SEQ ID NO: 2061 - DNA, 31 bp, Artificial Sequence
  Description of Artificial Sequence:  Enzymatic Nucleic Acid
cacattgaggctagctacaacgaaattagag

SEQ ID NO: 2062 - DNA, 31 bp, Artificial Sequence
  Description of Artificial Sequence:  Enzymatic Nucleic Acid
gtttcacaggctagctacaacgatgacaatt

SEQ ID NO: 2063 - DNA, 31 bp, Artificial Sequence
  Description of Artificial Sequence:  Enzymatic Nucleic Acid
gggtttcaggctagctacaacgaattgacaa

SEQ ID NO: 2064 - DNA, 31 bp, Artificial Sequence
  Description of Artificial Sequence:  Enzymatic Nucleic Acid
atctggggggctagctacaacgattcacatt

SEQ ID NO: 2065 - DNA, 31 bp, Artificial Sequence
  Description of Artificial Sequence:  Enzymatic Nucleic Acid
ttcgtaaaggctagctacaacgactggggtt

SEQ ID NO: 2066 - DNA, 31 bp, Artificial Sequence
  Description of Artificial Sequence:  Enzymatic Nucleic Acid
ccttttcgggctagctacaacgaaaatctgg

SEQ ID NO: 2067 - DNA, 31 bp, Artificial Sequence
  Description of Artificial Sequence:  Enzymatic Nucleic Acid
tgacacggggctagctacaacgacttttcgt

SEQ ID NO: 2068 - DNA, 31 bp, Artificial Sequence
  Description of Artificial Sequence:  Enzymatic Nucleic Acid
cgatgacaggctagctacaacgaggcctttt

SEQ ID NO: 2069 - DNA, 31 bp, Artificial Sequence
  Description of Artificial Sequence:  Enzymatic Nucleic Acid
aacgatgaggctagctacaacgaacggcctt

SEQ ID NO: 2070 - DNA, 31 bp, Artificial Sequence
  Description of Artificial Sequence:  Enzymatic Nucleic Acid
ggaaacgaggctagctacaacgagacacggc

SEQ ID NO: 2071 - DNA, 31 bp, Artificial Sequence
  Description of Artificial Sequence:  Enzymatic Nucleic Acid
tctggaaaggctagctacaacgagatgacac

SEQ ID NO: 2072 - DNA, 31 bp, Artificial Sequence
  Description of Artificial Sequence:  Enzymatic Nucleic Acid
gagccgggggctagctacaacgactggaaac

SEQ ID NO: 2073 - DNA, 31 bp, Artificial Sequence
  Description of Artificial Sequence:  Enzymatic Nucleic Acid
gtagagagggctagctacaacgacgggtctg

SEQ ID NO: 2074 - DNA, 31 bp, Artificial Sequence
  Description of Artificial Sequence:  Enzymatic Nucleic Acid
ccagtgggggctagctacaacgaagagagcc

SEQ ID NO: 2075 - DNA, 31 bp, Artificial Sequence
  Description of Artificial Sequence:  Enzymatic Nucleic Acid
ctgcccagggctagctacaacgagggtagag

SEQ ID NO: 2076 - DNA, 31 bp, Artificial Sequence
  Description of Artificial Sequence:  Enzymatic Nucleic Acid
gtctgctgggctagctacaacgaccagtggg

SEQ ID NO: 2077 - DNA, 31 bp, Artificial Sequence
  Description of Artificial Sequence:  Enzymatic Nucleic Acid
tttgtctgggctagctacaacgatgcccagt

SEQ ID NO: 2078 - DNA, 31 bp, Artificial Sequence
  Description of Artificial Sequence:  Enzymatic Nucleic Acid
aggatttgggctagctacaacgactgctgcc

SEQ ID NO: 2079 - DNA, 31 bp, Artificial Sequence
  Description of Artificial Sequence:  Enzymatic Nucleic Acid
agtcaggaggctagctacaacgattgtctgc

SEQ ID NO: 2080 - DNA, 31 bp, Artificial Sequence
  Description of Artificial Sequence:  Enzymatic Nucleic Acid
ggtacaagggctagctacaacgacaggattt

SEQ ID NO: 2081 - DNA, 31 bp, Artificial Sequence
  Description of Artificial Sequence:  Enzymatic Nucleic Acid
atgcggtaggctagctacaacgaaagtcagg

SEQ ID NO: 2082 - DNA, 31 bp, Artificial Sequence
  Description of Artificial Sequence:  Enzymatic Nucleic Acid
atatgcggggctagctacaacgaacaagtca

SEQ ID NO: 2083 - DNA, 31 bp, Artificial Sequence
  Description of Artificial Sequence:  Enzymatic Nucleic Acid
accatatgggctagctacaacgaggtacaag

SEQ ID NO: 2084 - DNA, 31 bp, Artificial Sequence
  Description of Artificial Sequence:  Enzymatic Nucleic Acid
ataccataggctagctacaacgagcggtaca

SEQ ID NO: 2085 - DNA, 31 bp, Artificial Sequence
  Description of Artificial Sequence:  Enzymatic Nucleic Acid
ggataccaggctagctacaacgaatgcggta

SEQ ID NO: 2086 - DNA, 31 bp, Artificial Sequence
  Description of Artificial Sequence:  Enzymatic Nucleic Acid
gagggataggctagctacaacgacatatgcg

SEQ ID NO: 2087 - DNA, 31 bp, Artificial Sequence
  Description of Artificial Sequence:  Enzymatic Nucleic Acid
ttgagggaggctagctacaacgaaccatatg

SEQ ID NO: 2088 - DNA, 31 bp, Artificial Sequence
  Description of Artificial Sequence:  Enzymatic Nucleic Acid
attgtaggggctagctacaacgatgagggat

SEQ ID NO: 2089 - DNA, 31 bp, Artificial Sequence
  Description of Artificial Sequence:  Enzymatic Nucleic Acid
cttgattgggctagctacaacgaaggttgag

SEQ ID NO: 2090 - DNA, 31 bp, Artificial Sequence
  Description of Artificial Sequence:  Enzymatic Nucleic Acid
ccacttgaggctagctacaacgatgtaggtt

SEQ ID NO: 2091 - DNA, 31 bp, Artificial Sequence
  Description of Artificial Sequence:  Enzymatic Nucleic Acid
cagaaccaggctagctacaacgattgattgt

SEQ ID NO: 2092 - DNA, 31 bp, Artificial Sequence
  Description of Artificial Sequence:  Enzymatic Nucleic Acid
tgccagaaggctagctacaacgacacttgat

SEQ ID NO: 2093 - DNA, 31 bp, Artificial Sequence
  Description of Artificial Sequence:  Enzymatic Nucleic Acid
caggggtgggctagctacaacgacagaacca

SEQ ID NO: 2094 - DNA, 31 bp, Artificial Sequence
  Description of Artificial Sequence:  Enzymatic Nucleic Acid
tacaggggggctagctacaacgagccagaac

SEQ ID NO: 2095 - DNA, 31 bp, Artificial Sequence
  Description of Artificial Sequence:  Enzymatic Nucleic Acid
tatggttaggctagctacaacgaaggggtgc

SEQ ID NO: 2096 - DNA, 31 bp, Artificial Sequence
  Description of Artificial Sequence:  Enzymatic Nucleic Acid
gattatggggctagctacaacgatacagggg

SEQ ID NO: 2097 - DNA, 31 bp, Artificial Sequence
  Description of Artificial Sequence:  Enzymatic Nucleic Acid
aatgattaggctagctacaacgaggttacag

SEQ ID NO: 2098 - DNA, 31 bp, Artificial Sequence
  Description of Artificial Sequence:  Enzymatic Nucleic Acid
cggaatgaggctagctacaacgatatggtta

SEQ ID NO: 2099 - DNA, 31 bp, Artificial Sequence
  Description of Artificial Sequence:  Enzymatic Nucleic Acid
cttcggaaggctagctacaacgagattatgg

SEQ ID NO: 2100 - DNA, 31 bp, Artificial Sequence
  Description of Artificial Sequence:  Enzymatic Nucleic Acid
acaccttgggctagctacaacgattcggaat

SEQ ID NO: 2101 - DNA, 31 bp, Artificial Sequence
  Description of Artificial Sequence:  Enzymatic Nucleic Acid
aagtcacaggctagctacaacgacttgcttc

SEQ ID NO: 2102 - DNA, 31 bp, Artificial Sequence
  Description of Artificial Sequence:  Enzymatic Nucleic Acid
aaaagtcaggctagctacaacgaaccttgct

SEQ ID NO: 2103 - DNA, 31 bp, Artificial Sequence
  Description of Artificial Sequence:  Enzymatic Nucleic Acid
aacaaaagggctagctacaacgacacacctt

SEQ ID NO: 2104 - DNA, 31 bp, Artificial Sequence
  Description of Artificial Sequence:  Enzymatic Nucleic Acid
tattggaaggctagctacaacgaaaaagtca

SEQ ID NO: 2105 - DNA, 31 bp, Artificial Sequence
  Description of Artificial Sequence:  Enzymatic Nucleic Acid
cttcattaggctagctacaacgatggaacaa

SEQ ID NO: 2106 - DNA, 31 bp, Artificial Sequence
  Description of Artificial Sequence:  Enzymatic Nucleic Acid
actcttcaggctagctacaacgatattggaa

SEQ ID NO: 2107 - DNA, 31 bp, Artificial Sequence
  Description of Artificial Sequence:  Enzymatic Nucleic Acid
ataaaggaggctagctacaacgatcttcatt

SEQ ID NO: 2108 - DNA, 31 bp, Artificial Sequence
  Description of Artificial Sequence:  Enzymatic Nucleic Acid
atccaggaggctagctacaacgaaaaggact

SEQ ID NO: 2109 - DNA, 31 bp, Artificial Sequence
  Description of Artificial Sequence:  Enzymatic Nucleic Acid
tgtcagcaggctagctacaacgaccaggata

SEQ ID NO: 2110 - DNA, 31 bp, Artificial Sequence
  Description of Artificial Sequence:  Enzymatic Nucleic Acid
gctgtcagggctagctacaacgaatccagga

SEQ ID NO: 2111 - DNA, 31 bp, Artificial Sequence
  Description of Artificial Sequence:  Enzymatic Nucleic Acid
tgttgctgggctagctacaacgacagcatcc

SEQ ID NO: 2112 - DNA, 31 bp, Artificial Sequence
  Description of Artificial Sequence:  Enzymatic Nucleic Acid
ccatgttgggctagctacaacgatgtcagca

SEQ ID NO: 2113 - DNA, 31 bp, Artificial Sequence
  Description of Artificial Sequence:  Enzymatic Nucleic Acid
ttcccatgggctagctacaacgatgctgtca

SEQ ID NO: 2114 - DNA, 31 bp, Artificial Sequence
  Description of Artificial Sequence:  Enzymatic Nucleic Acid
gtttcccaggctagctacaacgagttgctgt

SEQ ID NO: 2115 - DNA, 31 bp, Artificial Sequence
  Description of Artificial Sequence:  Enzymatic Nucleic Acid
caattctgggctagctacaacgattcccatg

SEQ ID NO: 2116 - DNA, 31 bp, Artificial Sequence
  Description of Artificial Sequence:  Enzymatic Nucleic Acid
gctctcaaggctagctacaacgatctgtttc

SEQ ID NO: 2117 - DNA, 31 bp, Artificial Sequence
  Description of Artificial Sequence:  Enzymatic Nucleic Acid
gagtgatgggctagctacaacgatctcaatt

SEQ ID NO: 2118 - DNA, 31 bp, Artificial Sequence
  Description of Artificial Sequence:  Enzymatic Nucleic Acid
ctgagtgaggctagctacaacgagctctcaa

SEQ ID NO: 2119 - DNA, 31 bp, Artificial Sequence
  Description of Artificial Sequence:  Enzymatic Nucleic Acid
gcgctgagggctagctacaacgagatgctct

SEQ ID NO: 2120 - DNA, 31 bp, Artificial Sequence
  Description of Artificial Sequence:  Enzymatic Nucleic Acid
gccatgcgggctagctacaacgatgagtgat

SEQ ID NO: 2121 - DNA, 31 bp, Artificial Sequence
  Description of Artificial Sequence:  Enzymatic Nucleic Acid
ttgccatgggctagctacaacgagctgagtg

SEQ ID NO: 2122 - DNA, 31 bp, Artificial Sequence
  Description of Artificial Sequence:  Enzymatic Nucleic Acid
tattgccaggctagctacaacgagcgctgag

SEQ ID NO: 2123 - DNA, 31 bp, Artificial Sequence
  Description of Artificial Sequence:  Enzymatic Nucleic Acid
tattattgggctagctacaacgacatgcgct

SEQ ID NO: 2124 - DNA, 31 bp, Artificial Sequence
  Description of Artificial Sequence:  Enzymatic Nucleic Acid
ttctattaggctagctacaacgatgccatgc

SEQ ID NO: 2125 - DNA, 31 bp, Artificial Sequence
  Description of Artificial Sequence:  Enzymatic Nucleic Acid
tccttctaggctagctacaacgatattgcca

SEQ ID NO: 2126 - DNA, 31 bp, Artificial Sequence
  Description of Artificial Sequence:  Enzymatic Nucleic Acid
ccatcttaggctagctacaacgatctttcct

SEQ ID NO: 2127 - DNA, 31 bp, Artificial Sequence
  Description of Artificial Sequence:  Enzymatic Nucleic Acid
gctagccaggctagctacaacgacttattct

SEQ ID NO: 2128 - DNA, 31 bp, Artificial Sequence
  Description of Artificial Sequence:  Enzymatic Nucleic Acid
ggtgctagggctagctacaacgacatcttat

SEQ ID NO: 2129 - DNA, 31 bp, Artificial Sequence
  Description of Artificial Sequence:  Enzymatic Nucleic Acid
ccaaggtgggctagctacaacgatagccatc

SEQ ID NO: 2130 - DNA, 31 bp, Artificial Sequence
  Description of Artificial Sequence:  Enzymatic Nucleic Acid
aaccaaggggctagctacaacgagctagcca

SEQ ID NO: 2131 - DNA, 31 bp, Artificial Sequence
  Description of Artificial Sequence:  Enzymatic Nucleic Acid
agccacaaggctagctacaacgacaaggtgc

SEQ ID NO: 2132 - DNA, 31 bp, Artificial Sequence
  Description of Artificial Sequence:  Enzymatic Nucleic Acid
gtcagccaggctagctacaacgaaaccaagg

SEQ ID NO: 2133 - DNA, 31 bp, Artificial Sequence
  Description of Artificial Sequence:  Enzymatic Nucleic Acid
agagtcagggctagctacaacgacacaacca

SEQ ID NO: 2134 - DNA, 31 bp, Artificial Sequence
  Description of Artificial Sequence:  Enzymatic Nucleic Acid
ttctagagggctagctacaacgacagccaca

SEQ ID NO: 2135 - DNA, 31 bp, Artificial Sequence
  Description of Artificial Sequence:  Enzymatic Nucleic Acid
tccagaaaggctagctacaacgatctagagt

SEQ ID NO: 2136 - DNA, 31 bp, Artificial Sequence
  Description of Artificial Sequence:  Enzymatic Nucleic Acid
aatgtagaggctagctacaacgatccagaaa

SEQ ID NO: 2137 - DNA, 31 bp, Artificial Sequence
  Description of Artificial Sequence:  Enzymatic Nucleic Acid
tgcaaatgggctagctacaacgaagattcca

SEQ ID NO: 2138 - DNA, 31 bp, Artificial Sequence
  Description of Artificial Sequence:  Enzymatic Nucleic Acid
tatgcaaaggctagctacaacgagtagattc

SEQ ID NO: 2139 - DNA, 31 bp, Artificial Sequence
  Description of Artificial Sequence:  Enzymatic Nucleic Acid
aagctatgggctagctacaacgaaaatgtag

SEQ ID NO: 2140 - DNA, 31 bp, Artificial Sequence
  Description of Artificial Sequence:  Enzymatic Nucleic Acid
ggaagctaggctagctacaacgagcaaatgt

SEQ ID NO: 2141 - DNA, 31 bp, Artificial Sequence
  Description of Artificial Sequence:  Enzymatic Nucleic Acid
attggaagggctagctacaacgatatgcaaa

SEQ ID NO: 2142 - DNA, 31 bp, Artificial Sequence
  Description of Artificial Sequence:  Enzymatic Nucleic Acid
caactttaggctagctacaacgatggaagct

SEQ ID NO: 2143 - DNA, 31 bp, Artificial Sequence
  Description of Artificial Sequence:  Enzymatic Nucleic Acid
agtcccaaggctagctacaacgatttattgg

SEQ ID NO: 2144 - DNA, 31 bp, Artificial Sequence
  Description of Artificial Sequence:  Enzymatic Nucleic Acid
tcccacagggctagctacaacgacccaactt

SEQ ID NO: 2145 - DNA, 31 bp, Artificial Sequence
  Description of Artificial Sequence:  Enzymatic Nucleic Acid
tcttcccaggctagctacaacgaagtcccaa

SEQ ID NO: 2146 - DNA, 31 bp, Artificial Sequence
  Description of Artificial Sequence:  Enzymatic Nucleic Acid
agcttatgggctagctacaacgattcttccc

SEQ ID NO: 2147 - DNA, 31 bp, Artificial Sequence
  Description of Artificial Sequence:  Enzymatic Nucleic Acid
aaagcttaggctagctacaacgagtttcttc

SEQ ID NO: 2148 - DNA, 31 bp, Artificial Sequence
  Description of Artificial Sequence:  Enzymatic Nucleic Acid
tataaaagggctagctacaacgattatgttt

SEQ ID NO: 2149 - DNA, 31 bp, Artificial Sequence
  Description of Artificial Sequence:  Enzymatic Nucleic Acid
ctgtgataggctagctacaacgaaaaagctt

SEQ ID NO: 2150 - DNA, 31 bp, Artificial Sequence
  Description of Artificial Sequence:  Enzymatic Nucleic Acid
atctgtgaggctagctacaacgaataaaagc

SEQ ID NO: 2151 - DNA, 31 bp, Artificial Sequence
  Description of Artificial Sequence:  Enzymatic Nucleic Acid
cacatctgggctagctacaacgagatataaa

SEQ ID NO: 2152 - DNA, 31 bp, Artificial Sequence
  Description of Artificial Sequence:  Enzymatic Nucleic Acid
ttggcacaggctagctacaacgactgtgata

SEQ ID NO: 2153 - DNA, 31 bp, Artificial Sequence
  Description of Artificial Sequence:  Enzymatic Nucleic Acid
atttggcaggctagctacaacgaatctgtga

SEQ ID NO: 2154 - DNA, 31 bp, Artificial Sequence
  Description of Artificial Sequence:  Enzymatic Nucleic Acid
ccatttggggctagctacaacgaacatctgt

SEQ ID NO: 2155 - DNA, 31 bp, Artificial Sequence
  Description of Artificial Sequence:  Enzymatic Nucleic Acid
gaaacccaggctagctacaacgattggcaca

SEQ ID NO: 2156 - DNA, 31 bp, Artificial Sequence
  Description of Artificial Sequence:  Enzymatic Nucleic Acid
acatgaaaggctagctacaacgaccatttgg

SEQ ID NO: 2157 - DNA, 31 bp, Artificial Sequence
  Description of Artificial Sequence:  Enzymatic Nucleic Acid
agttaacaggctagctacaacgagaaaccca

SEQ ID NO: 2158 - DNA, 31 bp, Artificial Sequence
  Description of Artificial Sequence:  Enzymatic Nucleic Acid
caagttaaggctagctacaacgaatgaaacc

SEQ ID NO: 2159 - DNA, 31 bp, Artificial Sequence
  Description of Artificial Sequence:  Enzymatic Nucleic Acid
tttccaagggctagctacaacgataacatga

SEQ ID NO: 2160 - DNA, 31 bp, Artificial Sequence
  Description of Artificial Sequence:  Enzymatic Nucleic Acid
cgtcggcaggctagctacaacgatttttcca

SEQ ID NO: 2161 - DNA, 31 bp, Artificial Sequence
  Description of Artificial Sequence:  Enzymatic Nucleic Acid
tccgtcggggctagctacaacgaattttttc

SEQ ID NO: 2162 - DNA, 31 bp, Artificial Sequence
  Description of Artificial Sequence:  Enzymatic Nucleic Acid
tccttccgggctagctacaacgacggcattt

SEQ ID NO: 2163 - DNA, 31 bp, Artificial Sequence
  Description of Artificial Sequence:  Enzymatic Nucleic Acid
gtttcaggggctagctacaacgacctctcct

SEQ ID NO: 2164 - DNA, 31 bp, Artificial Sequence
  Description of Artificial Sequence:  Enzymatic Nucleic Acid
caagacagggctagctacaacgattcaggtc

SEQ ID NO: 2165 - DNA, 31 bp, Artificial Sequence
  Description of Artificial Sequence:  Enzymatic Nucleic Acid
gtgcaagaggctagctacaacgaagtttcag

SEQ ID NO: 2166 - DNA, 31 bp, Artificial Sequence
  Description of Artificial Sequence:  Enzymatic Nucleic Acid
taactgtgggctagctacaacgaaagacagt

SEQ ID NO: 2167 - DNA, 31 bp, Artificial Sequence
  Description of Artificial Sequence:  Enzymatic Nucleic Acid
gttaactgggctagctacaacgagcaagaca

SEQ ID NO: 2168 - DNA, 31 bp, Artificial Sequence
  Description of Artificial Sequence:  Enzymatic Nucleic Acid
cttgttaaggctagctacaacgatgtgcaag

SEQ ID NO: 2169 - DNA, 31 bp, Artificial Sequence
  Description of Artificial Sequence:  Enzymatic Nucleic Acid
agaacttgggctagctacaacgataactgtg

SEQ ID NO: 2170 - DNA, 31 bp, Artificial Sequence
  Description of Artificial Sequence:  Enzymatic Nucleic Acid
tataagaaggctagctacaacgattgttaac

SEQ ID NO: 2171 - DNA, 31 bp, Artificial Sequence
  Description of Artificial Sequence:  Enzymatic Nucleic Acid
tctctgtaggctagctacaacgaaagaactt

SEQ ID NO: 2172 - DNA, 31 bp, Artificial Sequence
  Description of Artificial Sequence:  Enzymatic Nucleic Acid
cgtctctgggctagctacaacgaataagaac

SEQ ID NO: 2173 - DNA, 31 bp, Artificial Sequence
  Description of Artificial Sequence:  Enzymatic Nucleic Acid
aagtaacgggctagctacaacgactctgtat

SEQ ID NO: 2174 - DNA, 31 bp, Artificial Sequence
  Description of Artificial Sequence:  Enzymatic Nucleic Acid
ccaagtaaggctagctacaacgagtctctgt

SEQ ID NO: 2175 - DNA, 31 bp, Artificial Sequence
  Description of Artificial Sequence:  Enzymatic Nucleic Acid
aatccaagggctagctacaacgaaacgtctc

SEQ ID NO: 2176 - DNA, 31 bp, Artificial Sequence
  Description of Artificial Sequence:  Enzymatic Nucleic Acid
cagtaaaaggctagctacaacgaccaagtaa

SEQ ID NO: 2177 - DNA, 31 bp, Artificial Sequence
  Description of Artificial Sequence:  Enzymatic Nucleic Acid
gtccgcagggctagctacaacgaaaaatcca

SEQ ID NO: 2178 - DNA, 31 bp, Artificial Sequence
  Description of Artificial Sequence:  Enzymatic Nucleic Acid
actgtccgggctagctacaacgaagtaaaat

SEQ ID NO: 2179 - DNA, 31 bp, Artificial Sequence
  Description of Artificial Sequence:  Enzymatic Nucleic Acid
attaactgggctagctacaacgaccgcagta

SEQ ID NO: 2180 - DNA, 31 bp, Artificial Sequence
  Description of Artificial Sequence:  Enzymatic Nucleic Acid
gttattaaggctagctacaacgatgtccgca

SEQ ID NO: 2181 - DNA, 31 bp, Artificial Sequence
  Description of Artificial Sequence:  Enzymatic Nucleic Acid
ttctgttaggctagctacaacgataactgtc

SEQ ID NO: 2182 - DNA, 31 bp, Artificial Sequence
  Description of Artificial Sequence:  Enzymatic Nucleic Acid
ttgttctgggctagctacaacgatattaact

SEQ ID NO: 2183 - DNA, 31 bp, Artificial Sequence
  Description of Artificial Sequence:  Enzymatic Nucleic Acid
gtgcattgggctagctacaacgatctgttat

SEQ ID NO: 2184 - DNA, 31 bp, Artificial Sequence
  Description of Artificial Sequence:  Enzymatic Nucleic Acid
gtagtgcaggctagctacaacgatgttctgt

SEQ ID NO: 2185 - DNA, 31 bp, Artificial Sequence
  Description of Artificial Sequence:  Enzymatic Nucleic Acid
ctgtagtgggctagctacaacgaattgttct

SEQ ID NO: 2186 - DNA, 31 bp, Artificial Sequence
  Description of Artificial Sequence:  Enzymatic Nucleic Acid
tactgtagggctagctacaacgagcattgtt

SEQ ID NO: 2187 - DNA, 31 bp, Artificial Sequence
  Description of Artificial Sequence:  Enzymatic Nucleic Acid
taatactgggctagctacaacgaagtgcatt

SEQ ID NO: 2188 - DNA, 31 bp, Artificial Sequence
  Description of Artificial Sequence:  Enzymatic Nucleic Acid
tgctaataggctagctacaacgatgtagtgc

SEQ ID NO: 2189 - DNA, 31 bp, Artificial Sequence
  Description of Artificial Sequence:  Enzymatic Nucleic Acid
cttgctaaggctagctacaacgaactgtagt

SEQ ID NO: 2190 - DNA, 31 bp, Artificial Sequence
  Description of Artificial Sequence:  Enzymatic Nucleic Acid
tttgcttgggctagctacaacgataatactg

SEQ ID NO: 2191 - DNA, 31 bp, Artificial Sequence
  Description of Artificial Sequence:  Enzymatic Nucleic Acid
attttttgggctagctacaacgattgctaat

SEQ ID NO: 2192 - DNA, 31 bp, Artificial Sequence
  Description of Artificial Sequence:  Enzymatic Nucleic Acid
gatggccaggctagctacaacgatttttgct

SEQ ID NO: 2193 - DNA, 31 bp, Artificial Sequence
  Description of Artificial Sequence:  Enzymatic Nucleic Acid
agtgatggggctagctacaacgacatttttt

SEQ ID NO: 2194 - DNA, 31 bp, Artificial Sequence
  Description of Artificial Sequence:  Enzymatic Nucleic Acid
cttagtgaggctagctacaacgaggccattt

SEQ ID NO: 2195 - DNA, 31 bp, Artificial Sequence
  Description of Artificial Sequence:  Enzymatic Nucleic Acid
ctccttagggctagctacaacgagatggcca

SEQ ID NO: 2196 - DNA, 31 bp, Artificial Sequence
  Description of Artificial Sequence:  Enzymatic Nucleic Acid
atggagtgggctagctacaacgatccttagt

SEQ ID NO: 2197 - DNA, 31 bp, Artificial Sequence
  Description of Artificial Sequence:  Enzymatic Nucleic Acid
tgatggagggctagctacaacgagctcctta

SEQ ID NO: 2198 - DNA, 31 bp, Artificial Sequence
  Description of Artificial Sequence:  Enzymatic Nucleic Acid
aagagtgaggctagctacaacgaggagtgct

SEQ ID NO: 2199 - DNA, 31 bp, Artificial Sequence
  Description of Artificial Sequence:  Enzymatic Nucleic Acid
attaagagggctagctacaacgagatggagt

SEQ ID NO: 2200 - DNA, 31 bp, Artificial Sequence
  Description of Artificial Sequence:  Enzymatic Nucleic Acid
tggtaagaggctagctacaacgataagagtg

SEQ ID NO: 2201 - DNA, 31 bp, Artificial Sequence
  Description of Artificial Sequence:  Enzymatic Nucleic Acid
catgatggggctagctacaacgaaagattaa

SEQ ID NO: 2202 - DNA, 31 bp, Artificial Sequence
  Description of Artificial Sequence:  Enzymatic Nucleic Acid
attcatgaggctagctacaacgaggtaagat

SEQ ID NO: 2203 - DNA, 31 bp, Artificial Sequence
  Description of Artificial Sequence:  Enzymatic Nucleic Acid
aacattcaggctagctacaacgagatggtaa

SEQ ID NO: 2204 - DNA, 31 bp, Artificial Sequence
  Description of Artificial Sequence:  Enzymatic Nucleic Acid
gggaaacaggctagctacaacgatcatgatg

SEQ ID NO: 2205 - DNA, 31 bp, Artificial Sequence
  Description of Artificial Sequence:  Enzymatic Nucleic Acid
cagggaaaggctagctacaacgaattcatga

SEQ ID NO: 2206 - DNA, 31 bp, Artificial Sequence
  Description of Artificial Sequence:  Enzymatic Nucleic Acid
gaatcttgggctagctacaacgaagggaaac

SEQ ID NO: 2207 - DNA, 31 bp, Artificial Sequence
  Description of Artificial Sequence:  Enzymatic Nucleic Acid
tgcctgaaggctagctacaacgacttgcagg

SEQ ID NO: 2208 - DNA, 31 bp, Artificial Sequence
  Description of Artificial Sequence:  Enzymatic Nucleic Acid
cataggtgggctagctacaacgactgaatct

SEQ ID NO: 2209 - DNA, 31 bp, Artificial Sequence
  Description of Artificial Sequence:  Enzymatic Nucleic Acid
ggcataggggctagctacaacgagcctgaat

SEQ ID NO: 2210 - DNA, 31 bp, Artificial Sequence
  Description of Artificial Sequence:  Enzymatic Nucleic Acid
tgcaggcaggctagctacaacgaaggtgcct

SEQ ID NO: 2211 - DNA, 31 bp, Artificial Sequence
  Description of Artificial Sequence:  Enzymatic Nucleic Acid
tctgcaggggctagctacaacgaataggtgc

SEQ ID NO: 2212 - DNA, 31 bp, Artificial Sequence
  Description of Artificial Sequence:  Enzymatic Nucleic Acid
tggctctgggctagctacaacgaaggcatag

SEQ ID NO: 2213 - DNA, 31 bp, Artificial Sequence
  Description of Artificial Sequence:  Enzymatic Nucleic Acid
attcctggggctagctacaacgatctgcagg

SEQ ID NO: 2214 - DNA, 31 bp, Artificial Sequence
  Description of Artificial Sequence:  Enzymatic Nucleic Acid
tgtatacaggctagctacaacgatcctggct

SEQ ID NO: 2215 - DNA, 31 bp, Artificial Sequence
  Description of Artificial Sequence:  Enzymatic Nucleic Acid
tgtgtataggctagctacaacgaattcctgg

SEQ ID NO: 2216 - DNA, 31 bp, Artificial Sequence
  Description of Artificial Sequence:  Enzymatic Nucleic Acid
cctgtgtaggctagctacaacgaacattcct

SEQ ID NO: 2217 - DNA, 31 bp, Artificial Sequence
  Description of Artificial Sequence:  Enzymatic Nucleic Acid
cccctgtgggctagctacaacgaatacattc

SEQ ID NO: 2218 - DNA, 31 bp, Artificial Sequence
  Description of Artificial Sequence:  Enzymatic Nucleic Acid
ttcccctgggctagctacaacgagtatacat

SEQ ID NO: 2219 - DNA, 31 bp, Artificial Sequence
  Description of Artificial Sequence:  Enzymatic Nucleic Acid
ctggaggaggctagctacaacgattcttccc

SEQ ID NO: 2220 - DNA, 31 bp, Artificial Sequence
  Description of Artificial Sequence:  Enzymatic Nucleic Acid
gattgtaaggctagctacaacgattctttct

SEQ ID NO: 2221 - DNA, 31 bp, Artificial Sequence
  Description of Artificial Sequence:  Enzymatic Nucleic Acid
tctgattgggctagctacaacgaaatttctt

SEQ ID NO: 2222 - DNA, 31 bp, Artificial Sequence
  Description of Artificial Sequence:  Enzymatic Nucleic Acid
atctctgaggctagctacaacgatgtaattt

SEQ ID NO: 2223 - DNA, 31 bp, Artificial Sequence
  Description of Artificial Sequence:  Enzymatic Nucleic Acid
cttcctgaggctagctacaacgactctgatt

SEQ ID NO: 2224 - DNA, 31 bp, Artificial Sequence
  Description of Artificial Sequence:  Enzymatic Nucleic Acid
gtatggtgggctagctacaacgattcctgat

SEQ ID NO: 2225 - DNA, 31 bp, Artificial Sequence
  Description of Artificial Sequence:  Enzymatic Nucleic Acid
aggtatggggctagctacaacgagcttcctg

SEQ ID NO: 2226 - DNA, 31 bp, Artificial Sequence
  Description of Artificial Sequence:  Enzymatic Nucleic Acid
aggaggtaggctagctacaacgaggtgcttc

SEQ ID NO: 2227 - DNA, 31 bp, Artificial Sequence
  Description of Artificial Sequence:  Enzymatic Nucleic Acid
gcaggaggggctagctacaacgaatggtgct

SEQ ID NO: 2228 - DNA, 31 bp, Artificial Sequence
  Description of Artificial Sequence:  Enzymatic Nucleic Acid
aggtttcgggctagctacaacgaaggaggta

SEQ ID NO: 2229 - DNA, 31 bp, Artificial Sequence
  Description of Artificial Sequence:  Enzymatic Nucleic Acid
cactgaggggctagctacaacgattcgcagg

SEQ ID NO: 2230 - DNA, 31 bp, Artificial Sequence
  Description of Artificial Sequence:  Enzymatic Nucleic Acid
tgtgatcaggctagctacaacgatgaggttt

SEQ ID NO: 2231 - DNA, 31 bp, Artificial Sequence
  Description of Artificial Sequence:  Enzymatic Nucleic Acid
ctgtgtgaggctagctacaacgacactgagg

SEQ ID NO: 2232 - DNA, 31 bp, Artificial Sequence
  Description of Artificial Sequence:  Enzymatic Nucleic Acid
ccactgtgggctagctacaacgagatcactg

SEQ ID NO: 2233 - DNA, 31 bp, Artificial Sequence
  Description of Artificial Sequence:  Enzymatic Nucleic Acid
ggccactgggctagctacaacgagtgatcac

SEQ ID NO: 2234 - DNA, 31 bp, Artificial Sequence
  Description of Artificial Sequence:  Enzymatic Nucleic Acid
gatggccaggctagctacaacgatgtgtgat

SEQ ID NO: 2235 - DNA, 31 bp, Artificial Sequence
  Description of Artificial Sequence:  Enzymatic Nucleic Acid
gctgatggggctagctacaacgacactgtgt

SEQ ID NO: 2236 - DNA, 31 bp, Artificial Sequence
  Description of Artificial Sequence:  Enzymatic Nucleic Acid
actgctgaggctagctacaacgaggccactg

SEQ ID NO: 2237 - DNA, 31 bp, Artificial Sequence
  Description of Artificial Sequence:  Enzymatic Nucleic Acid
tggaactgggctagctacaacgatgatggcc

SEQ ID NO: 2238 - DNA, 31 bp, Artificial Sequence
  Description of Artificial Sequence:  Enzymatic Nucleic Acid
tggtggaaggctagctacaacgatgctgatg

SEQ ID NO: 2239 - DNA, 31 bp, Artificial Sequence
  Description of Artificial Sequence:  Enzymatic Nucleic Acid
taaagtggggctagctacaacgaggaactgc

SEQ ID NO: 2240 - DNA, 31 bp, Artificial Sequence
  Description of Artificial Sequence:  Enzymatic Nucleic Acid
gtctaaagggctagctacaacgaggtggaac

SEQ ID NO: 2241 - DNA, 31 bp, Artificial Sequence
  Description of Artificial Sequence:  Enzymatic Nucleic Acid
catgacagggctagctacaacgactaaagtg

SEQ ID NO: 2242 - DNA, 31 bp, Artificial Sequence
  Description of Artificial Sequence:  Enzymatic Nucleic Acid
tagcatgaggctagctacaacgaagtctaaa

SEQ ID NO: 2243 - DNA, 31 bp, Artificial Sequence
  Description of Artificial Sequence:  Enzymatic Nucleic Acid
cattagcaggctagctacaacgagacagtct

SEQ ID NO: 2244 - DNA, 31 bp, Artificial Sequence
  Description of Artificial Sequence:  Enzymatic Nucleic Acid
accattagggctagctacaacgaatgacagt

SEQ ID NO: 2245 - DNA, 31 bp, Artificial Sequence
  Description of Artificial Sequence:  Enzymatic Nucleic Acid
ggacaccaggctagctacaacgatagcatga

SEQ ID NO: 2246 - DNA, 31 bp, Artificial Sequence
  Description of Artificial Sequence:  Enzymatic Nucleic Acid
cggggacaggctagctacaacgacattagca

SEQ ID NO: 2247 - DNA, 31 bp, Artificial Sequence
  Description of Artificial Sequence:  Enzymatic Nucleic Acid
ctcggggaggctagctacaacgaaccattag

SEQ ID NO: 2248 - DNA, 31 bp, Artificial Sequence
  Description of Artificial Sequence:  Enzymatic Nucleic Acid
atctgaggggctagctacaacgatcggggac

SEQ ID NO: 2249 - DNA, 31 bp, Artificial Sequence
  Description of Artificial Sequence:  Enzymatic Nucleic Acid
ccaagtgaggctagctacaacgactgaggct

SEQ ID NO: 2250 - DNA, 31 bp, Artificial Sequence
  Description of Artificial Sequence:  Enzymatic Nucleic Acid
aaaccaagggctagctacaacgagatctgag

SEQ ID NO: 2251 - DNA, 31 bp, Artificial Sequence
  Description of Artificial Sequence:  Enzymatic Nucleic Acid
tttttaaaggctagctacaacgacaagtgat

SEQ ID NO: 2252 - DNA, 31 bp, Artificial Sequence
  Description of Artificial Sequence:  Enzymatic Nucleic Acid
tgtggttgggctagctacaacgattttaaac

SEQ ID NO: 2253 - DNA, 31 bp, Artificial Sequence
  Description of Artificial Sequence:  Enzymatic Nucleic Acid
ttttgtggggctagctacaacgatgttttta

SEQ ID NO: 2254 - DNA, 31 bp, Artificial Sequence
  Description of Artificial Sequence:  Enzymatic Nucleic Acid
gtattttgggctagctacaacgaggttgttt

SEQ ID NO: 2255 - DNA, 31 bp, Artificial Sequence
  Description of Artificial Sequence:  Enzymatic Nucleic Acid
ttgttgtaggctagctacaacgatttgtggt

SEQ ID NO: 2256 - DNA, 31 bp, Artificial Sequence
  Description of Artificial Sequence:  Enzymatic Nucleic Acid
tcttgttgggctagctacaacgaattttgtg

SEQ ID NO: 2257 - DNA, 31 bp, Artificial Sequence
  Description of Artificial Sequence:  Enzymatic Nucleic Acid
ggctcttgggctagctacaacgatgtatttt

SEQ ID NO: 2258 - DNA, 31 bp, Artificial Sequence
  Description of Artificial Sequence:  Enzymatic Nucleic Acid
attccaggggctagctacaacgatcttgttg

SEQ ID NO: 2259 - DNA, 31 bp, Artificial Sequence
  Description of Artificial Sequence:  Enzymatic Nucleic Acid
taaaataaggctagctacaacgatccaggct

SEQ ID NO: 2260 - DNA, 31 bp, Artificial Sequence
  Description of Artificial Sequence:  Enzymatic Nucleic Acid
tcctaaaaggctagctacaacgaaattccag

SEQ ID NO: 2261 - DNA, 31 bp, Artificial Sequence
  Description of Artificial Sequence:  Enzymatic Nucleic Acid
cttcctggggctagctacaacgacctaaaat

SEQ ID NO: 2262 - DNA, 31 bp, Artificial Sequence
  Description of Artificial Sequence:  Enzymatic Nucleic Acid
gcgtgctgggctagctacaacgattcctggt

SEQ ID NO: 2263 - DNA, 31 bp, Artificial Sequence
  Description of Artificial Sequence:  Enzymatic Nucleic Acid
acagcgtgggctagctacaacgatgcttcct

SEQ ID NO: 2264 - DNA, 31 bp, Artificial Sequence
  Description of Artificial Sequence:  Enzymatic Nucleic Acid
aaacagcgggctagctacaacgagctgcttc

SEQ ID NO: 2265 - DNA, 31 bp, Artificial Sequence
  Description of Artificial Sequence:  Enzymatic Nucleic Acid
ataaacagggctagctacaacgagtgctgct

SEQ ID NO: 2266 - DNA, 31 bp, Artificial Sequence
  Description of Artificial Sequence:  Enzymatic Nucleic Acid
tcaataaaggctagctacaacgaagcgtgct

SEQ ID NO: 2267 - DNA, 31 bp, Artificial Sequence
  Description of Artificial Sequence:  Enzymatic Nucleic Acid
tctttcaaggctagctacaacgaaaacagcg

SEQ ID NO: 2268 - DNA, 31 bp, Artificial Sequence
  Description of Artificial Sequence:  Enzymatic Nucleic Acid
ttctgtgaggctagctacaacgatctttcaa

SEQ ID NO: 2269 - DNA, 31 bp, Artificial Sequence
  Description of Artificial Sequence:  Enzymatic Nucleic Acid
ctcttctgggctagctacaacgagactcttt

SEQ ID NO: 2270 - DNA, 31 bp, Artificial Sequence
  Description of Artificial Sequence:  Enzymatic Nucleic Acid
caccttcaggctagctacaacgacctcttct

SEQ ID NO: 2271 - DNA, 31 bp, Artificial Sequence
  Description of Artificial Sequence:  Enzymatic Nucleic Acid
gatagacaggctagctacaacgacttcatcc

SEQ ID NO: 2272 - DNA, 31 bp, Artificial Sequence
  Description of Artificial Sequence:  Enzymatic Nucleic Acid
gtgatagaggctagctacaacgaaccttcat

SEQ ID NO: 2273 - DNA, 31 bp, Artificial Sequence
  Description of Artificial Sequence:  Enzymatic Nucleic Acid
tgcagtgaggctagctacaacgaagacacct

SEQ ID NO: 2274 - DNA, 31 bp, Artificial Sequence
  Description of Artificial Sequence:  Enzymatic Nucleic Acid
ctttgcagggctagctacaacgagatagaca

SEQ ID NO: 2275 - DNA, 31 bp, Artificial Sequence
  Description of Artificial Sequence:  Enzymatic Nucleic Acid
tggctttgggctagctacaacgaagtgatag

SEQ ID NO: 2276 - DNA, 31 bp, Artificial Sequence
  Description of Artificial Sequence:  Enzymatic Nucleic Acid
gttggtggggctagctacaacgatttgcagt

SEQ ID NO: 2277 - DNA, 31 bp, Artificial Sequence
  Description of Artificial Sequence:  Enzymatic Nucleic Acid
ctggttggggctagctacaacgaggctttgc

SEQ ID NO: 2278 - DNA, 31 bp, Artificial Sequence
  Description of Artificial Sequence:  Enzymatic Nucleic Acid
ccttctggggctagctacaacgatggtggct

SEQ ID NO: 2279 - DNA, 31 bp, Artificial Sequence
  Description of Artificial Sequence:  Enzymatic Nucleic Acid
ccacagagggctagctacaacgaccttctgg

SEQ ID NO: 2280 - DNA, 31 bp, Artificial Sequence
  Description of Artificial Sequence:  Enzymatic Nucleic Acid
actttccaggctagctacaacgaagagccct

SEQ ID NO: 2281 - DNA, 31 bp, Artificial Sequence
  Description of Artificial Sequence:  Enzymatic Nucleic Acid
atgctgaaggctagctacaacgatttccaca

SEQ ID NO: 2282 - DNA, 31 bp, Artificial Sequence
  Description of Artificial Sequence:  Enzymatic Nucleic Acid
gaggtatgggctagctacaacgatgaacttt

SEQ ID NO: 2283 - DNA, 31 bp, Artificial Sequence
  Description of Artificial Sequence:  Enzymatic Nucleic Acid
gtgaggtaggctagctacaacgagctgaact

SEQ ID NO: 2284 - DNA, 31 bp, Artificial Sequence
  Description of Artificial Sequence:  Enzymatic Nucleic Acid
cagtgaggggctagctacaacgaatgctgaa

SEQ ID NO: 2285 - DNA, 31 bp, Artificial Sequence
  Description of Artificial Sequence:  Enzymatic Nucleic Acid
ttgaacagggctagctacaacgagaggtatg

SEQ ID NO: 2286 - DNA, 31 bp, Artificial Sequence
  Description of Artificial Sequence:  Enzymatic Nucleic Acid
tccttgaaggctagctacaacgaagtgaggt

SEQ ID NO: 2287 - DNA, 31 bp, Artificial Sequence
  Description of Artificial Sequence:  Enzymatic Nucleic Acid
gtccgaggggctagctacaacgatccttgaa

SEQ ID NO: 2288 - DNA, 31 bp, Artificial Sequence
  Description of Artificial Sequence:  Enzymatic Nucleic Acid
tagacttgggctagctacaacgaccgaggtt

SEQ ID NO: 2289 - DNA, 31 bp, Artificial Sequence
  Description of Artificial Sequence:  Enzymatic Nucleic Acid
agattagaggctagctacaacgattgtccga

SEQ ID NO: 2290 - DNA, 31 bp, Artificial Sequence
  Description of Artificial Sequence:  Enzymatic Nucleic Acid
gctccagaggctagctacaacgatagacttg

SEQ ID NO: 2291 - DNA, 31 bp, Artificial Sequence
  Description of Artificial Sequence:  Enzymatic Nucleic Acid
gtgatcagggctagctacaacgatccagatt

SEQ ID NO: 2292 - DNA, 31 bp, Artificial Sequence
  Description of Artificial Sequence:  Enzymatic Nucleic Acid
tagagtgaggctagctacaacgacagctcca

SEQ ID NO: 2293 - DNA, 31 bp, Artificial Sequence
  Description of Artificial Sequence:  Enzymatic Nucleic Acid
tgttagagggctagctacaacgagatcagct

SEQ ID NO: 2294 - DNA, 31 bp, Artificial Sequence
  Description of Artificial Sequence:  Enzymatic Nucleic Acid
ggtgcatgggctagctacaacgatagagtga

SEQ ID NO: 2295 - DNA, 31 bp, Artificial Sequence
  Description of Artificial Sequence:  Enzymatic Nucleic Acid
caggtgcaggctagctacaacgagttagagt

SEQ ID NO: 2296 - DNA, 31 bp, Artificial Sequence
  Description of Artificial Sequence:  Enzymatic Nucleic Acid
cacaggtgggctagctacaacgaatgttaga

SEQ ID NO: 2297 - DNA, 31 bp, Artificial Sequence
  Description of Artificial Sequence:  Enzymatic Nucleic Acid
cacacaggggctagctacaacgagcatgtta

SEQ ID NO: 2298 - DNA, 31 bp, Artificial Sequence
  Description of Artificial Sequence:  Enzymatic Nucleic Acid
cagccacaggctagctacaacgaaggtgcat

SEQ ID NO: 2299 - DNA, 31 bp, Artificial Sequence
  Description of Artificial Sequence:  Enzymatic Nucleic Acid
cgcagccaggctagctacaacgaacaggtgc

SEQ ID NO: 2300 - DNA, 31 bp, Artificial Sequence
  Description of Artificial Sequence:  Enzymatic Nucleic Acid
agtcgcagggctagctacaacgacacacagg

SEQ ID NO: 2301 - DNA, 31 bp, Artificial Sequence
  Description of Artificial Sequence:  Enzymatic Nucleic Acid
gagagtcgggctagctacaacgaagccacac

SEQ ID NO: 2302 - DNA, 31 bp, Artificial Sequence
  Description of Artificial Sequence:  Enzymatic Nucleic Acid
gaagagagggctagctacaacgacgcagcca

SEQ ID NO: 2303 - DNA, 31 bp, Artificial Sequence
  Description of Artificial Sequence:  Enzymatic Nucleic Acid
aataggagggctagctacaacgacagaagag

SEQ ID NO: 2304 - DNA, 31 bp, Artificial Sequence
  Description of Artificial Sequence:  Enzymatic Nucleic Acid
agggttaaggctagctacaacgaaggagcca

SEQ ID NO: 2305 - DNA, 31 bp, Artificial Sequence
  Description of Artificial Sequence:  Enzymatic Nucleic Acid
aaggagggggctagctacaacgataatagga

SEQ ID NO: 2306 - DNA, 31 bp, Artificial Sequence
  Description of Artificial Sequence:  Enzymatic Nucleic Acid
ttttcggaggctagctacaacgaaaggaggg

SEQ ID NO: 2307 - DNA, 31 bp, Artificial Sequence
  Description of Artificial Sequence:  Enzymatic Nucleic Acid
ccttttcaggctagctacaacgattttcgga

SEQ ID NO: 2308 - DNA, 31 bp, Artificial Sequence
  Description of Artificial Sequence:  Enzymatic Nucleic Acid
gaagaagaggctagctacaacgacttttcat

SEQ ID NO: 2309 - DNA, 31 bp, Artificial Sequence
  Description of Artificial Sequence:  Enzymatic Nucleic Acid
agtctttaggctagctacaacgattcagaag

SEQ ID NO: 2310 - DNA, 31 bp, Artificial Sequence
  Description of Artificial Sequence:  Enzymatic Nucleic Acid
gtagtcagggctagctacaacgactttattt

SEQ ID NO: 2311 - DNA, 31 bp, Artificial Sequence
  Description of Artificial Sequence:  Enzymatic Nucleic Acid
ataggtagggctagctacaacgacagtcttt

SEQ ID NO: 2312 - DNA, 31 bp, Artificial Sequence
  Description of Artificial Sequence:  Enzymatic Nucleic Acid
ttgataggggctagctacaacgaagtcagtc

SEQ ID NO: 2313 - DNA, 31 bp, Artificial Sequence
  Description of Artificial Sequence:  Enzymatic Nucleic Acid
ataattgaggctagctacaacgaaggtagtc

SEQ ID NO: 2314 - DNA, 31 bp, Artificial Sequence
  Description of Artificial Sequence:  Enzymatic Nucleic Acid
cattataaggctagctacaacgatgataggt

SEQ ID NO: 2315 - DNA, 31 bp, Artificial Sequence
  Description of Artificial Sequence:  Enzymatic Nucleic Acid
gtccattaggctagctacaacgaaattgata

SEQ ID NO: 2316 - DNA, 31 bp, Artificial Sequence
  Description of Artificial Sequence:  Enzymatic Nucleic Acid
tgggtccaggctagctacaacgatataattg

SEQ ID NO: 2317 - DNA, 31 bp, Artificial Sequence
  Description of Artificial Sequence:  Enzymatic Nucleic Acid
catctgggggctagctacaacgaccattata

SEQ ID NO: 2318 - DNA, 31 bp, Artificial Sequence
  Description of Artificial Sequence:  Enzymatic Nucleic Acid
gaacttcaggctagctacaacgactgggtcc

SEQ ID NO: 2319 - DNA, 31 bp, Artificial Sequence
  Description of Artificial Sequence:  Enzymatic Nucleic Acid
caaaggaaggctagctacaacgattcatctg

SEQ ID NO: 2320 - DNA, 31 bp, Artificial Sequence
  Description of Artificial Sequence:  Enzymatic Nucleic Acid
actgctcaggctagctacaacgaccaaagga

SEQ ID NO: 2321 - DNA, 31 bp, Artificial Sequence
  Description of Artificial Sequence:  Enzymatic Nucleic Acid
tcacactgggctagctacaacgatcatccaa

SEQ ID NO: 2322 - DNA, 31 bp, Artificial Sequence
  Description of Artificial Sequence:  Enzymatic Nucleic Acid
cgctcacaggctagctacaacgatgctcatc

SEQ ID NO: 2323 - DNA, 31 bp, Artificial Sequence
  Description of Artificial Sequence:  Enzymatic Nucleic Acid
gccgctcaggctagctacaacgaactgctca

SEQ ID NO: 2324 - DNA, 31 bp, Artificial Sequence
  Description of Artificial Sequence:  Enzymatic Nucleic Acid
gggagccgggctagctacaacgatcacactg

SEQ ID NO: 2325 - DNA, 31 bp, Artificial Sequence
  Description of Artificial Sequence:  Enzymatic Nucleic Acid
taagggagggctagctacaacgacgctcaca

SEQ ID NO: 2326 - DNA, 31 bp, Artificial Sequence
  Description of Artificial Sequence:  Enzymatic Nucleic Acid
tggcatcaggctagctacaacgaaagggagc

SEQ ID NO: 2327 - DNA, 31 bp, Artificial Sequence
  Description of Artificial Sequence:  Enzymatic Nucleic Acid
tgctggcaggctagctacaacgacataaggg

SEQ ID NO: 2328 - DNA, 31 bp, Artificial Sequence
  Description of Artificial Sequence:  Enzymatic Nucleic Acid
cttgctggggctagctacaacgaatcataag

SEQ ID NO: 2329 - DNA, 31 bp, Artificial Sequence
  Description of Artificial Sequence:  Enzymatic Nucleic Acid
cccacttgggctagctacaacgatggcatca

SEQ ID NO: 2330 - DNA, 31 bp, Artificial Sequence
  Description of Artificial Sequence:  Enzymatic Nucleic Acid
aactcccaggctagctacaacgattgctggc

SEQ ID NO: 2331 - DNA, 31 bp, Artificial Sequence
  Description of Artificial Sequence:  Enzymatic Nucleic Acid
cgggcaaaggctagctacaacgatcccactt

SEQ ID NO: 2332 - DNA, 31 bp, Artificial Sequence
  Description of Artificial Sequence:  Enzymatic Nucleic Acid
ctcccgggggctagctacaacgaaaactccc

SEQ ID NO: 2333 - DNA, 31 bp, Artificial Sequence
  Description of Artificial Sequence:  Enzymatic Nucleic Acid
agtttaagggctagctacaacgactctcccg

SEQ ID NO: 2334 - DNA, 31 bp, Artificial Sequence
  Description of Artificial Sequence:  Enzymatic Nucleic Acid
ttgcccagggctagctacaacgattaagtct

SEQ ID NO: 2335 - DNA, 31 bp, Artificial Sequence
  Description of Artificial Sequence:  Enzymatic Nucleic Acid
gtgatttgggctagctacaacgaccagttta

SEQ ID NO: 2336 - DNA, 31 bp, Artificial Sequence
  Description of Artificial Sequence:  Enzymatic Nucleic Acid
ccaagtgaggctagctacaacgattgcccag

SEQ ID NO: 2337 - DNA, 31 bp, Artificial Sequence
  Description of Artificial Sequence:  Enzymatic Nucleic Acid
cttccaagggctagctacaacgagatttgcc

SEQ ID NO: 2338 - DNA, 31 bp, Artificial Sequence
  Description of Artificial Sequence:  Enzymatic Nucleic Acid
tccaaaagggctagctacaacgaccctcttc

SEQ ID NO: 2339 - DNA, 31 bp, Artificial Sequence
  Description of Artificial Sequence:  Enzymatic Nucleic Acid
ttgaaccaggctagctacaacgattttccaa

SEQ ID NO: 2340 - DNA, 31 bp, Artificial Sequence
  Description of Artificial Sequence:  Enzymatic Nucleic Acid
tgcttgaaggctagctacaacgacacttttc

SEQ ID NO: 2341 - DNA, 31 bp, Artificial Sequence
  Description of Artificial Sequence:  Enzymatic Nucleic Acid
tgctgatgggctagctacaacgattgaacca

SEQ ID NO: 2342 - DNA, 31 bp, Artificial Sequence
  Description of Artificial Sequence:  Enzymatic Nucleic Acid
aatgctgaggctagctacaacgagcttgaac

SEQ ID NO: 2343 - DNA, 31 bp, Artificial Sequence
  Description of Artificial Sequence:  Enzymatic Nucleic Acid
gccaaatgggctagctacaacgatgatgctt

SEQ ID NO: 2344 - DNA, 31 bp, Artificial Sequence
  Description of Artificial Sequence:  Enzymatic Nucleic Acid
atgccaaaggctagctacaacgagctgatgc

SEQ ID NO: 2345 - DNA, 31 bp, Artificial Sequence
  Description of Artificial Sequence:  Enzymatic Nucleic Acid
tcttaatgggctagctacaacgacaaatgct

SEQ ID NO: 2346 - DNA, 31 bp, Artificial Sequence
  Description of Artificial Sequence:  Enzymatic Nucleic Acid
tttcttaaggctagctacaacgagccaaatg

SEQ ID NO: 2347 - DNA, 31 bp, Artificial Sequence
  Description of Artificial Sequence:  Enzymatic Nucleic Acid
gtaggtgaggctagctacaacgattcttaat

SEQ ID NO: 2348 - DNA, 31 bp, Artificial Sequence
  Description of Artificial Sequence:  Enzymatic Nucleic Acid
cacgtaggggctagctacaacgagatttctt

SEQ ID NO: 2349 - DNA, 31 bp, Artificial Sequence
  Description of Artificial Sequence:  Enzymatic Nucleic Acid
ccggcacgggctagctacaacgaaggtgatt

SEQ ID NO: 2350 - DNA, 31 bp, Artificial Sequence
  Description of Artificial Sequence:  Enzymatic Nucleic Acid
gtccggcaggctagctacaacgagtaggtga

SEQ ID NO: 2351 - DNA, 31 bp, Artificial Sequence
  Description of Artificial Sequence:  Enzymatic Nucleic Acid
cagtccggggctagctacaacgaacgtaggt

SEQ ID NO: 2352 - DNA, 31 bp, Artificial Sequence
  Description of Artificial Sequence:  Enzymatic Nucleic Acid
agccacagggctagctacaacgaccggcacg

SEQ ID NO: 2353 - DNA, 31 bp, Artificial Sequence
  Description of Artificial Sequence:  Enzymatic Nucleic Acid
cacagccaggctagctacaacgaagtccggc

SEQ ID NO: 2354 - DNA, 31 bp, Artificial Sequence
  Description of Artificial Sequence:  Enzymatic Nucleic Acid
tttcacagggctagctacaacgacacagtcc

SEQ ID NO: 2355 - DNA, 31 bp, Artificial Sequence
  Description of Artificial Sequence:  Enzymatic Nucleic Acid
cattttcaggctagctacaacgaagccacag

SEQ ID NO: 2356 - DNA, 31 bp, Artificial Sequence
  Description of Artificial Sequence:  Enzymatic Nucleic Acid
tttcagcaggctagctacaacgatttcacag

SEQ ID NO: 2357 - DNA, 31 bp, Artificial Sequence
  Description of Artificial Sequence:  Enzymatic Nucleic Acid
tctttcagggctagctacaacgaattttcac

SEQ ID NO: 2358 - DNA, 31 bp, Artificial Sequence
  Description of Artificial Sequence:  Enzymatic Nucleic Acid
ggccgtggggctagctacaacgacccctctt

SEQ ID NO: 2359 - DNA, 31 bp, Artificial Sequence
  Description of Artificial Sequence:  Enzymatic Nucleic Acid
gctggccgggctagctacaacgaggccccct

SEQ ID NO: 2360 - DNA, 31 bp, Artificial Sequence
  Description of Artificial Sequence:  Enzymatic Nucleic Acid
ctcgctggggctagctacaacgacgtggccc

SEQ ID NO: 2361 - DNA, 31 bp, Artificial Sequence
  Description of Artificial Sequence:  Enzymatic Nucleic Acid
tgtactcgggctagctacaacgatggccgtg

SEQ ID NO: 2362 - DNA, 31 bp, Artificial Sequence
  Description of Artificial Sequence:  Enzymatic Nucleic Acid
gctttgtaggctagctacaacgatcgctggc

SEQ ID NO: 2363 - DNA, 31 bp, Artificial Sequence
  Description of Artificial Sequence:  Enzymatic Nucleic Acid
gagctttgggctagctacaacgaactcgctg

SEQ ID NO: 2364 - DNA, 31 bp, Artificial Sequence
  Description of Artificial Sequence:  Enzymatic Nucleic Acid
catcagagggctagctacaacgatttgtact

SEQ ID NO: 2365 - DNA, 31 bp, Artificial Sequence
  Description of Artificial Sequence:  Enzymatic Nucleic Acid
ctcagtcaggctagctacaacgacagagctt

SEQ ID NO: 2366 - DNA, 31 bp, Artificial Sequence
  Description of Artificial Sequence:  Enzymatic Nucleic Acid
tagctcagggctagctacaacgacatcagag

SEQ ID NO: 2367 - DNA, 31 bp, Artificial Sequence
  Description of Artificial Sequence:  Enzymatic Nucleic Acid
atttttagggctagctacaacgatcagtcat

SEQ ID NO: 2368 - DNA, 31 bp, Artificial Sequence
  Description of Artificial Sequence:  Enzymatic Nucleic Acid
ggtcaagaggctagctacaacgattttagct

SEQ ID NO: 2369 - DNA, 31 bp, Artificial Sequence
  Description of Artificial Sequence:  Enzymatic Nucleic Acid
aatgtgggggctagctacaacgacaagattt

SEQ ID NO: 2370 - DNA, 31 bp, Artificial Sequence
  Description of Artificial Sequence:  Enzymatic Nucleic Acid
ggccaatgggctagctacaacgagggtcaag

SEQ ID NO: 2371 - DNA, 31 bp, Artificial Sequence
  Description of Artificial Sequence:  Enzymatic Nucleic Acid
gtggccaaggctagctacaacgagtgggtca

SEQ ID NO: 2372 - DNA, 31 bp, Artificial Sequence
  Description of Artificial Sequence:  Enzymatic Nucleic Acid
gatggtggggctagctacaacgacaatgtgg

SEQ ID NO: 2373 - DNA, 31 bp, Artificial Sequence
  Description of Artificial Sequence:  Enzymatic Nucleic Acid
tcagatggggctagctacaacgaggccaatg

SEQ ID NO: 2374 - DNA, 31 bp, Artificial Sequence
  Description of Artificial Sequence:  Enzymatic Nucleic Acid
cgttcagaggctagctacaacgaggtggcca

SEQ ID NO: 2375 - DNA, 31 bp, Artificial Sequence
  Description of Artificial Sequence:  Enzymatic Nucleic Acid
taaccacgggctagctacaacgatcagatgg

SEQ ID NO: 2376 - DNA, 31 bp, Artificial Sequence
  Description of Artificial Sequence:  Enzymatic Nucleic Acid
gttaaccaggctagctacaacgagttcagat

SEQ ID NO: 2377 - DNA, 31 bp, Artificial Sequence
  Description of Artificial Sequence:  Enzymatic Nucleic Acid
caggttaaggctagctacaacgacacgttca

SEQ ID NO: 2378 - DNA, 31 bp, Artificial Sequence
  Description of Artificial Sequence:  Enzymatic Nucleic Acid
ccagcaggggctagctacaacgataaccacg

SEQ ID NO: 2379 - DNA, 31 bp, Artificial Sequence
  Description of Artificial Sequence:  Enzymatic Nucleic Acid
gctcccagggctagctacaacgaaggttaac

SEQ ID NO: 2380 - DNA, 31 bp, Artificial Sequence
  Description of Artificial Sequence:  Enzymatic Nucleic Acid
ggtgcaggggctagctacaacgatcccagca

SEQ ID NO: 2381 - DNA, 31 bp, Artificial Sequence
  Description of Artificial Sequence:  Enzymatic Nucleic Acid
gcttggtgggctagctacaacgaaggctccc

SEQ ID NO: 2382 - DNA, 31 bp, Artificial Sequence
  Description of Artificial Sequence:  Enzymatic Nucleic Acid
ttgcttggggctagctacaacgagcaggctc

SEQ ID NO: 2383 - DNA, 31 bp, Artificial Sequence
  Description of Artificial Sequence:  Enzymatic Nucleic Acid
cctccttgggctagctacaacgattggtgca

SEQ ID NO: 2384 - DNA, 31 bp, Artificial Sequence
  Description of Artificial Sequence:  Enzymatic Nucleic Acid
atcagaggggctagctacaacgacctccttg

SEQ ID NO: 2385 - DNA, 31 bp, Artificial Sequence
  Description of Artificial Sequence:  Enzymatic Nucleic Acid
aatcaccaggctagctacaacgacagaggcc

SEQ ID NO: 2386 - DNA, 31 bp, Artificial Sequence
  Description of Artificial Sequence:  Enzymatic Nucleic Acid
aacaatcaggctagctacaacgacatcagag

SEQ ID NO: 2387 - DNA, 31 bp, Artificial Sequence
  Description of Artificial Sequence:  Enzymatic Nucleic Acid
ttcaacaaggctagctacaacgacaccatca

SEQ ID NO: 2388 - DNA, 31 bp, Artificial Sequence
  Description of Artificial Sequence:  Enzymatic Nucleic Acid
gtattcaaggctagctacaacgaaatcacca

SEQ ID NO: 2389 - DNA, 31 bp, Artificial Sequence
  Description of Artificial Sequence:  Enzymatic Nucleic Acid
ttgcagtaggctagctacaacgatcaacaat

SEQ ID NO: 2390 - DNA, 31 bp, Artificial Sequence
  Description of Artificial Sequence:  Enzymatic Nucleic Acid
atttgcagggctagctacaacgaattcaaca

SEQ ID NO: 2391 - DNA, 31 bp, Artificial Sequence
  Description of Artificial Sequence:  Enzymatic Nucleic Acid
catatttgggctagctacaacgaagtattca

SEQ ID NO: 2392 - DNA, 31 bp, Artificial Sequence
  Description of Artificial Sequence:  Enzymatic Nucleic Acid
tttccataggctagctacaacgattgcagta

SEQ ID NO: 2393 - DNA, 31 bp, Artificial Sequence
  Description of Artificial Sequence:  Enzymatic Nucleic Acid
gatttccaggctagctacaacgaatttgcag

SEQ ID NO: 2394 - DNA, 31 bp, Artificial Sequence
  Description of Artificial Sequence:  Enzymatic Nucleic Acid
tggagagaggctagctacaacgattccatat

SEQ ID NO: 2395 - DNA, 31 bp, Artificial Sequence
  Description of Artificial Sequence:  Enzymatic Nucleic Acid
tgaggtagggctagctacaacgatggagaga

SEQ ID NO: 2396 - DNA, 31 bp, Artificial Sequence
  Description of Artificial Sequence:  Enzymatic Nucleic Acid
tcttgaggggctagctacaacgaagttggag

SEQ ID NO: 2397 - DNA, 31 bp, Artificial Sequence
  Description of Artificial Sequence:  Enzymatic Nucleic Acid
cacgtttgggctagctacaacgatcttgagg

SEQ ID NO: 2398 - DNA, 31 bp, Artificial Sequence
  Description of Artificial Sequence:  Enzymatic Nucleic Acid
aagtcacgggctagctacaacgattgctctt

SEQ ID NO: 2399 - DNA, 31 bp, Artificial Sequence
  Description of Artificial Sequence:  Enzymatic Nucleic Acid
ataagtcaggctagctacaacgagtttgctc

SEQ ID NO: 2400 - DNA, 31 bp, Artificial Sequence
  Description of Artificial Sequence:  Enzymatic Nucleic Acid
aaaataagggctagctacaacgacacgtttg

SEQ ID NO: 2401 - DNA, 31 bp, Artificial Sequence
  Description of Artificial Sequence:  Enzymatic Nucleic Acid
agaaaaaaggctagctacaacgaaagtcacg

SEQ ID NO: 2402 - DNA, 31 bp, Artificial Sequence
  Description of Artificial Sequence:  Enzymatic Nucleic Acid
catccttgggctagctacaacgatgagaaaa

SEQ ID NO: 2403 - DNA, 31 bp, Artificial Sequence
  Description of Artificial Sequence:  Enzymatic Nucleic Acid
gtgctgcaggctagctacaacgaccttgttg

SEQ ID NO: 2404 - DNA, 31 bp, Artificial Sequence
  Description of Artificial Sequence:  Enzymatic Nucleic Acid
tagtgctgggctagctacaacgaatccttgt

SEQ ID NO: 2405 - DNA, 31 bp, Artificial Sequence
  Description of Artificial Sequence:  Enzymatic Nucleic Acid
gtgtagtgggctagctacaacgatgcatcct

SEQ ID NO: 2406 - DNA, 31 bp, Artificial Sequence
  Description of Artificial Sequence:  Enzymatic Nucleic Acid
atgtgtagggctagctacaacgagctgcatc

SEQ ID NO: 2407 - DNA, 31 bp, Artificial Sequence
  Description of Artificial Sequence:  Enzymatic Nucleic Acid
tccatgtgggctagctacaacgaagtgctgc

SEQ ID NO: 2408 - DNA, 31 bp, Artificial Sequence
  Description of Artificial Sequence:  Enzymatic Nucleic Acid
gctccatgggctagctacaacgagtagtgct

SEQ ID NO: 2409 - DNA, 31 bp, Artificial Sequence
  Description of Artificial Sequence:  Enzymatic Nucleic Acid
aggctccaggctagctacaacgagtgtagtg

SEQ ID NO: 2410 - DNA, 31 bp, Artificial Sequence
  Description of Artificial Sequence:  Enzymatic Nucleic Acid
ttcttaggggctagctacaacgatccatgtg

SEQ ID NO: 2411 - DNA, 31 bp, Artificial Sequence
  Description of Artificial Sequence:  Enzymatic Nucleic Acid
tggctccaggctagctacaacgatttttctt

SEQ ID NO: 2412 - DNA, 31 bp, Artificial Sequence
  Description of Artificial Sequence:  Enzymatic Nucleic Acid
aggcctggggctagctacaacgatccatttt

SEQ ID NO: 2413 - DNA, 31 bp, Artificial Sequence
  Description of Artificial Sequence:  Enzymatic Nucleic Acid
gttccaggggctagctacaacgactggctcc

SEQ ID NO: 2414 - DNA, 31 bp, Artificial Sequence
  Description of Artificial Sequence:  Enzymatic Nucleic Acid
ttgccttgggctagctacaacgatccaggcc

SEQ ID NO: 2415 - DNA, 31 bp, Artificial Sequence
  Description of Artificial Sequence:  Enzymatic Nucleic Acid
gtttcttgggctagctacaacgacttgttcc

SEQ ID NO: 2416 - DNA, 31 bp, Artificial Sequence
  Description of Artificial Sequence:  Enzymatic Nucleic Acid
agtcttggggctagctacaacgattcttgcc

SEQ ID NO: 2417 - DNA, 31 bp, Artificial Sequence
  Description of Artificial Sequence:  Enzymatic Nucleic Acid
ctatctagggctagctacaacgacttggttt

SEQ ID NO: 2418 - DNA, 31 bp, Artificial Sequence
  Description of Artificial Sequence:  Enzymatic Nucleic Acid
tgacgctaggctagctacaacgactagtctt

SEQ ID NO: 2419 - DNA, 31 bp, Artificial Sequence
  Description of Artificial Sequence:  Enzymatic Nucleic Acid
tggtgacgggctagctacaacgatatctagt

SEQ ID NO: 2420 - DNA, 31 bp, Artificial Sequence
  Description of Artificial Sequence:  Enzymatic Nucleic Acid
gctggtgaggctagctacaacgagctatcta

SEQ ID NO: 2421 - DNA, 31 bp, Artificial Sequence
  Description of Artificial Sequence:  Enzymatic Nucleic Acid
gctgctggggctagctacaacgagacgctat

SEQ ID NO: 2422 - DNA, 31 bp, Artificial Sequence
  Description of Artificial Sequence:  Enzymatic Nucleic Acid
tttcgctgggctagctacaacgatggtgacg

SEQ ID NO: 2423 - DNA, 31 bp, Artificial Sequence
  Description of Artificial Sequence:  Enzymatic Nucleic Acid
agctttcgggctagctacaacgatgctggtg

SEQ ID NO: 2424 - DNA, 31 bp, Artificial Sequence
  Description of Artificial Sequence:  Enzymatic Nucleic Acid
tcgcaaagggctagctacaacgatttcgctg

SEQ ID NO: 2425 - DNA, 31 bp, Artificial Sequence
  Description of Artificial Sequence:  Enzymatic Nucleic Acid
ggagctcgggctagctacaacgaaaagcttt

SEQ ID NO: 2426 - DNA, 31 bp, Artificial Sequence
  Description of Artificial Sequence:  Enzymatic Nucleic Acid
agccggagggctagctacaacgatcgcaaag

SEQ ID NO: 2427 - DNA, 31 bp, Artificial Sequence
  Description of Artificial Sequence:  Enzymatic Nucleic Acid
cctgaaagggctagctacaacgacggagctc

SEQ ID NO: 2428 - DNA, 31 bp, Artificial Sequence
  Description of Artificial Sequence:  Enzymatic Nucleic Acid
gacttttaggctagctacaacgacttcctga

SEQ ID NO: 2429 - DNA, 31 bp, Artificial Sequence
  Description of Artificial Sequence:  Enzymatic Nucleic Acid
cactcagaggctagctacaacgattttatct

SEQ ID NO: 2430 - DNA, 31 bp, Artificial Sequence
  Description of Artificial Sequence:  Enzymatic Nucleic Acid
caacatcaggctagctacaacgatcagactt

SEQ ID NO: 2431 - DNA, 31 bp, Artificial Sequence
  Description of Artificial Sequence:  Enzymatic Nucleic Acid
cctcaacaggctagctacaacgacactcaga

SEQ ID NO: 2432 - DNA, 31 bp, Artificial Sequence
  Description of Artificial Sequence:  Enzymatic Nucleic Acid
ttcctcaaggctagctacaacgaatcactca

SEQ ID NO: 2433 - DNA, 31 bp, Artificial Sequence
  Description of Artificial Sequence:  Enzymatic Nucleic Acid
cgtcagaaggctagctacaacgacctcctct

SEQ ID NO: 2434 - DNA, 31 bp, Artificial Sequence
  Description of Artificial Sequence:  Enzymatic Nucleic Acid
agaaaccgggctagctacaacgacagaatcc

SEQ ID NO: 2435 - DNA, 31 bp, Artificial Sequence
  Description of Artificial Sequence:  Enzymatic Nucleic Acid
tgtagaaaggctagctacaacgacgtcagaa

SEQ ID NO: 2436 - DNA, 31 bp, Artificial Sequence
  Description of Artificial Sequence:  Enzymatic Nucleic Acid
gctccttgggctagctacaacgaagaaaccg

SEQ ID NO: 2437 - DNA, 31 bp, Artificial Sequence
  Description of Artificial Sequence:  Enzymatic Nucleic Acid
gtgatgggggctagctacaacgatccttgta

SEQ ID NO: 2438 - DNA, 31 bp, Artificial Sequence
  Description of Artificial Sequence:  Enzymatic Nucleic Acid
catagtgaggctagctacaacgagggctcct

SEQ ID NO: 2439 - DNA, 31 bp, Artificial Sequence
  Description of Artificial Sequence:  Enzymatic Nucleic Acid
ttccatagggctagctacaacgagatgggct

SEQ ID NO: 2440 - DNA, 31 bp, Artificial Sequence
  Description of Artificial Sequence:  Enzymatic Nucleic Acid
atcttccaggctagctacaacgaagtgatgg

SEQ ID NO: 2441 - DNA, 31 bp, Artificial Sequence
  Description of Artificial Sequence:  Enzymatic Nucleic Acid
aaatcagaggctagctacaacgacttccata

SEQ ID NO: 2442 - DNA, 31 bp, Artificial Sequence
  Description of Artificial Sequence:  Enzymatic Nucleic Acid
gtaagaaaggctagctacaacgacagatctt

SEQ ID NO: 2443 - DNA, 31 bp, Artificial Sequence
  Description of Artificial Sequence:  Enzymatic Nucleic Acid
gaaaactgggctagctacaacgaaagaaatc

SEQ ID NO: 2444 - DNA, 31 bp, Artificial Sequence
  Description of Artificial Sequence:  Enzymatic Nucleic Acid
cttgaaaaggctagctacaacgatgtaagaa

SEQ ID NO: 2445 - DNA, 31 bp, Artificial Sequence
  Description of Artificial Sequence:  Enzymatic Nucleic Acid
tctggccaggctagctacaacgattgaaaac

SEQ ID NO: 2446 - DNA, 31 bp, Artificial Sequence
  Description of Artificial Sequence:  Enzymatic Nucleic Acid
gcctctggggctagctacaacgacacttgaa

SEQ ID NO: 2447 - DNA, 31 bp, Artificial Sequence
  Description of Artificial Sequence:  Enzymatic Nucleic Acid
actccatgggctagctacaacgactctggcc

SEQ ID NO: 2448 - DNA, 31 bp, Artificial Sequence
  Description of Artificial Sequence:  Enzymatic Nucleic Acid
gaactccaggctagctacaacgagcctctgg

SEQ ID NO: 2449 - DNA, 31 bp, Artificial Sequence
  Description of Artificial Sequence:  Enzymatic Nucleic Acid
gacaggaaggctagctacaacgatccatgcc

SEQ ID NO: 2450 - DNA, 31 bp, Artificial Sequence
  Description of Artificial Sequence:  Enzymatic Nucleic Acid
ctggaagaggctagctacaacgaaggaactc

SEQ ID NO: 2451 - DNA, 31 bp, Artificial Sequence
  Description of Artificial Sequence:  Enzymatic Nucleic Acid
tgaatgcaggctagctacaacgatttctgga

SEQ ID NO: 2452 - DNA, 31 bp, Artificial Sequence
  Description of Artificial Sequence:  Enzymatic Nucleic Acid
gatgaatgggctagctacaacgaactttctg

SEQ ID NO: 2453 - DNA, 31 bp, Artificial Sequence
  Description of Artificial Sequence:  Enzymatic Nucleic Acid
ccgatgaaggctagctacaacgagcactttc

SEQ ID NO: 2454 - DNA, 31 bp, Artificial Sequence
  Description of Artificial Sequence:  Enzymatic Nucleic Acid
ggtcccgaggctagctacaacgagaatgcac

SEQ ID NO: 2455 - DNA, 31 bp, Artificial Sequence
  Description of Artificial Sequence:  Enzymatic Nucleic Acid
ctgccaggggctagctacaacgacccgatga

SEQ ID NO: 2456 - DNA, 31 bp, Artificial Sequence
  Description of Artificial Sequence:  Enzymatic Nucleic Acid
tctcgctgggctagctacaacgacaggtccc

SEQ ID NO: 2457 - DNA, 31 bp, Artificial Sequence
  Description of Artificial Sequence:  Enzymatic Nucleic Acid
gtttctcgggctagctacaacgatgccaggt

SEQ ID NO: 2458 - DNA, 31 bp, Artificial Sequence
  Description of Artificial Sequence:  Enzymatic Nucleic Acid
aaagaatgggctagctacaacgattctcgct

SEQ ID NO: 2459 - DNA, 31 bp, Artificial Sequence
  Description of Artificial Sequence:  Enzymatic Nucleic Acid
taaaagaaggctagctacaacgagtttctcg

SEQ ID NO: 2460 - DNA, 31 bp, Artificial Sequence
  Description of Artificial Sequence:  Enzymatic Nucleic Acid
ttctcagaggctagctacaacgaaaaagaat

SEQ ID NO: 2461 - DNA, 31 bp, Artificial Sequence
  Description of Artificial Sequence:  Enzymatic Nucleic Acid
ccacgttgggctagctacaacgatctcagat

SEQ ID NO: 2462 - DNA, 31 bp, Artificial Sequence
  Description of Artificial Sequence:  Enzymatic Nucleic Acid
tcaccacgggctagctacaacgatgttctca

SEQ ID NO: 2463 - DNA, 31 bp, Artificial Sequence
  Description of Artificial Sequence:  Enzymatic Nucleic Acid
cttcaccaggctagctacaacgagttgttct

SEQ ID NO: 2464 - DNA, 31 bp, Artificial Sequence
  Description of Artificial Sequence:  Enzymatic Nucleic Acid
aatcttcaggctagctacaacgacacgttgt

SEQ ID NO: 2465 - DNA, 31 bp, Artificial Sequence
  Description of Artificial Sequence:  Enzymatic Nucleic Acid
atcacaaaggctagctacaacgacttcacca

SEQ ID NO: 2466 - DNA, 31 bp, Artificial Sequence
  Description of Artificial Sequence:  Enzymatic Nucleic Acid
caaaatcaggctagctacaacgaaaatcttc

SEQ ID NO: 2467 - DNA, 31 bp, Artificial Sequence
  Description of Artificial Sequence:  Enzymatic Nucleic Acid
ggccaaaaggctagctacaacgacacaaatc

SEQ ID NO: 2468 - DNA, 31 bp, Artificial Sequence
  Description of Artificial Sequence:  Enzymatic Nucleic Acid
gggcaaggggctagctacaacgacaaaatca

SEQ ID NO: 2469 - DNA, 31 bp, Artificial Sequence
  Description of Artificial Sequence:  Enzymatic Nucleic Acid
atcccgggggctagctacaacgaaaggccaa

SEQ ID NO: 2470 - DNA, 31 bp, Artificial Sequence
  Description of Artificial Sequence:  Enzymatic Nucleic Acid
tataaataggctagctacaacgacccgggca

SEQ ID NO: 2471 - DNA, 31 bp, Artificial Sequence
  Description of Artificial Sequence:  Enzymatic Nucleic Acid
cttataaaggctagctacaacgaatcccggg

SEQ ID NO: 2472 - DNA, 31 bp, Artificial Sequence
  Description of Artificial Sequence:  Enzymatic Nucleic Acid
ggttcttaggctagctacaacgaaaatatcc

SEQ ID NO: 2473 - DNA, 31 bp, Artificial Sequence
  Description of Artificial Sequence:  Enzymatic Nucleic Acid
aatcggggggctagctacaacgatcttataa

SEQ ID NO: 2474 - DNA, 31 bp, Artificial Sequence
  Description of Artificial Sequence:  Enzymatic Nucleic Acid
tcacataaggctagctacaacgacggggttc

SEQ ID NO: 2475 - DNA, 31 bp, Artificial Sequence
  Description of Artificial Sequence:  Enzymatic Nucleic Acid
ttctcacaggctagctacaacgaaatcgggg

SEQ ID NO: 2476 - DNA, 31 bp, Artificial Sequence
  Description of Artificial Sequence:  Enzymatic Nucleic Acid
ttttctcaggctagctacaacgaataatcgg

SEQ ID NO: 2477 - DNA, 31 bp, Artificial Sequence
  Description of Artificial Sequence:  Enzymatic Nucleic Acid
gtcgagtaggctagctacaacgactcctttt

SEQ ID NO: 2478 - DNA, 31 bp, Artificial Sequence
  Description of Artificial Sequence:  Enzymatic Nucleic Acid
aagtcgagggctagctacaacgaatctcctt

SEQ ID NO: 2479 - DNA, 31 bp, Artificial Sequence
  Description of Artificial Sequence:  Enzymatic Nucleic Acid
agaggaagggctagctacaacgacgagtatc

SEQ ID NO: 2480 - DNA, 31 bp, Artificial Sequence
  Description of Artificial Sequence:  Enzymatic Nucleic Acid
gccatccaggctagctacaacgattcagagg

SEQ ID NO: 2481 - DNA, 31 bp, Artificial Sequence
  Description of Artificial Sequence:  Enzymatic Nucleic Acid
gggagccaggctagctacaacgaccatttca

SEQ ID NO: 2482 - DNA, 31 bp, Artificial Sequence
  Description of Artificial Sequence:  Enzymatic Nucleic Acid
ttcgggagggctagctacaacgacatccatt

SEQ ID NO: 2483 - DNA, 31 bp, Artificial Sequence
  Description of Artificial Sequence:  Enzymatic Nucleic Acid
aagatagaggctagctacaacgatcgggagc

SEQ ID NO: 2484 - DNA, 31 bp, Artificial Sequence
  Description of Artificial Sequence:  Enzymatic Nucleic Acid
gtcaaagaggctagctacaacgaagattcgg

SEQ ID NO: 2485 - DNA, 31 bp, Artificial Sequence
  Description of Artificial Sequence:  Enzymatic Nucleic Acid
agattttgggctagctacaacgacaaagata

SEQ ID NO: 2486 - DNA, 31 bp, Artificial Sequence
  Description of Artificial Sequence:  Enzymatic Nucleic Acid
gctgtagaggctagctacaacgatttgtcaa

SEQ ID NO: 2487 - DNA, 31 bp, Artificial Sequence
  Description of Artificial Sequence:  Enzymatic Nucleic Acid
tggtgctgggctagctacaacgaagattttg

SEQ ID NO: 2488 - DNA, 31 bp, Artificial Sequence
  Description of Artificial Sequence:  Enzymatic Nucleic Acid
tcttggtgggctagctacaacgatgtagatt

SEQ ID NO: 2489 - DNA, 31 bp, Artificial Sequence
  Description of Artificial Sequence:  Enzymatic Nucleic Acid
gctcttggggctagctacaacgagctgtaga

SEQ ID NO: 2490 - DNA, 31 bp, Artificial Sequence
  Description of Artificial Sequence:  Enzymatic Nucleic Acid
acacgtcgggctagctacaacgatcttggtg

SEQ ID NO: 2491 - DNA, 31 bp, Artificial Sequence
  Description of Artificial Sequence:  Enzymatic Nucleic Acid
accacacgggctagctacaacgacgctcttg

SEQ ID NO: 2492 - DNA, 31 bp, Artificial Sequence
  Description of Artificial Sequence:  Enzymatic Nucleic Acid
agaccacaggctagctacaacgagtcgctct

SEQ ID NO: 2493 - DNA, 31 bp, Artificial Sequence
  Description of Artificial Sequence:  Enzymatic Nucleic Acid
taagaccaggctagctacaacgaacgtcgct

SEQ ID NO: 2494 - DNA, 31 bp, Artificial Sequence
  Description of Artificial Sequence:  Enzymatic Nucleic Acid
ccgtaagaggctagctacaacgacacacgtc

SEQ ID NO: 2495 - DNA, 31 bp, Artificial Sequence
  Description of Artificial Sequence:  Enzymatic Nucleic Acid
atactccgggctagctacaacgaaagaccac

SEQ ID NO: 2496 - DNA, 31 bp, Artificial Sequence
  Description of Artificial Sequence:  Enzymatic Nucleic Acid
cagcaataggctagctacaacgatccgtaag

SEQ ID NO: 2497 - DNA, 31 bp, Artificial Sequence
  Description of Artificial Sequence:  Enzymatic Nucleic Acid
cacagcaaggctagctacaacgaactccgta

SEQ ID NO: 2498 - DNA, 31 bp, Artificial Sequence
  Description of Artificial Sequence:  Enzymatic Nucleic Acid
tcccacagggctagctacaacgaaatactcc

SEQ ID NO: 2499 - DNA, 31 bp, Artificial Sequence
  Description of Artificial Sequence:  Enzymatic Nucleic Acid
atttcccaggctagctacaacgaagcaatac

SEQ ID NO: 2500 - DNA, 31 bp, Artificial Sequence
  Description of Artificial Sequence:  Enzymatic Nucleic Acid
ggagaagaggctagctacaacgattcccaca

SEQ ID NO: 2501 - DNA, 31 bp, Artificial Sequence
  Description of Artificial Sequence:  Enzymatic Nucleic Acid
gagacccaggctagctacaacgactaaggag

SEQ ID NO: 2502 - DNA, 31 bp, Artificial Sequence
  Description of Artificial Sequence:  Enzymatic Nucleic Acid
tatggagaggctagctacaacgaccacctaa

SEQ ID NO: 2503 - DNA, 31 bp, Artificial Sequence
  Description of Artificial Sequence:  Enzymatic Nucleic Acid
cctgggtaggctagctacaacgaggagaccc

SEQ ID NO: 2504 - DNA, 31 bp, Artificial Sequence
  Description of Artificial Sequence:  Enzymatic Nucleic Acid
ctcctgggggctagctacaacgaatggagac

SEQ ID NO: 2505 - DNA, 31 bp, Artificial Sequence
  Description of Artificial Sequence:  Enzymatic Nucleic Acid
catttgtaggctagctacaacgatcctgggt

SEQ ID NO: 2506 - DNA, 31 bp, Artificial Sequence
  Description of Artificial Sequence:  Enzymatic Nucleic Acid
tccatttgggctagctacaacgaactcctgg

SEQ ID NO: 2507 - DNA, 31 bp, Artificial Sequence
  Description of Artificial Sequence:  Enzymatic Nucleic Acid
ctcatccaggctagctacaacgattgtactc

SEQ ID NO: 2508 - DNA, 31 bp, Artificial Sequence
  Description of Artificial Sequence:  Enzymatic Nucleic Acid
agtcctcaggctagctacaacgaccatttgt

SEQ ID NO: 2509 - DNA, 31 bp, Artificial Sequence
  Description of Artificial Sequence:  Enzymatic Nucleic Acid
tgcaaaagggctagctacaacgacctcatcc

SEQ ID NO: 2510 - DNA, 31 bp, Artificial Sequence
  Description of Artificial Sequence:  Enzymatic Nucleic Acid
ggcgactgggctagctacaacgaaaaagtcc

SEQ ID NO: 2511 - DNA, 31 bp, Artificial Sequence
  Description of Artificial Sequence:  Enzymatic Nucleic Acid
tcaggcgaggctagctacaacgatgcaaaag

SEQ ID NO: 2512 - DNA, 31 bp, Artificial Sequence
  Description of Artificial Sequence:  Enzymatic Nucleic Acid
ccctcaggggctagctacaacgagactgcaa

SEQ ID NO: 2513 - DNA, 31 bp, Artificial Sequence
  Description of Artificial Sequence:  Enzymatic Nucleic Acid
tcctcatgggctagctacaacgacttccctc

SEQ ID NO: 2514 - DNA, 31 bp, Artificial Sequence
  Description of Artificial Sequence:  Enzymatic Nucleic Acid
catcctcaggctagctacaacgagccttccc

SEQ ID NO: 2515 - DNA, 31 bp, Artificial Sequence
  Description of Artificial Sequence:  Enzymatic Nucleic Acid
agctctcaggctagctacaacgacctcatgc

SEQ ID NO: 2516 - DNA, 31 bp, Artificial Sequence
  Description of Artificial Sequence:  Enzymatic Nucleic Acid
ctcaggagggctagctacaacgatctcatcc

SEQ ID NO: 2517 - DNA, 31 bp, Artificial Sequence
  Description of Artificial Sequence:  Enzymatic Nucleic Acid
gtagagtaggctagctacaacgatcaggagc

SEQ ID NO: 2518 - DNA, 31 bp, Artificial Sequence
  Description of Artificial Sequence:  Enzymatic Nucleic Acid
gagtagagggctagctacaacgaactcagga

SEQ ID NO: 2519 - DNA, 31 bp, Artificial Sequence
  Description of Artificial Sequence:  Enzymatic Nucleic Acid
ttcaggagggctagctacaacgaagagtact

SEQ ID NO: 2520 - DNA, 31 bp, Artificial Sequence
  Description of Artificial Sequence:  Enzymatic Nucleic Acid
ctgatagaggctagctacaacgattcaggag

SEQ ID NO: 2521 - DNA, 31 bp, Artificial Sequence
  Description of Artificial Sequence:  Enzymatic Nucleic Acid
tgatctgaggctagctacaacgaagatttca

SEQ ID NO: 2522 - DNA, 31 bp, Artificial Sequence
  Description of Artificial Sequence:  Enzymatic Nucleic Acid
cagcatgaggctagctacaacgactgataga

SEQ ID NO: 2523 - DNA, 31 bp, Artificial Sequence
  Description of Artificial Sequence:  Enzymatic Nucleic Acid
gtccagcaggctagctacaacgagatctgat

SEQ ID NO: 2524 - DNA, 31 bp, Artificial Sequence
  Description of Artificial Sequence:  Enzymatic Nucleic Acid
cagtccagggctagctacaacgaatgatctg

SEQ ID NO: 2525 - DNA, 31 bp, Artificial Sequence
  Description of Artificial Sequence:  Enzymatic Nucleic Acid
gccagcagggctagctacaacgaccagcatg

SEQ ID NO: 2526 - DNA, 31 bp, Artificial Sequence
  Description of Artificial Sequence:  Enzymatic Nucleic Acid
tgtgccagggctagctacaacgaagtccagc

SEQ ID NO: 2527 - DNA, 31 bp, Artificial Sequence
  Description of Artificial Sequence:  Enzymatic Nucleic Acid
tctctgtgggctagctacaacgacagcagtc

SEQ ID NO: 2528 - DNA, 31 bp, Artificial Sequence
  Description of Artificial Sequence:  Enzymatic Nucleic Acid
ggtctctgggctagctacaacgagccagcag

SEQ ID NO: 2529 - DNA, 31 bp, Artificial Sequence
  Description of Artificial Sequence:  Enzymatic Nucleic Acid
cttttgggggctagctacaacgactctgtgc

SEQ ID NO: 2530 - DNA, 31 bp, Artificial Sequence
  Description of Artificial Sequence:  Enzymatic Nucleic Acid
aatcttggggctagctacaacgactttcttt

SEQ ID NO: 2531 - DNA, 31 bp, Artificial Sequence
  Description of Artificial Sequence:  Enzymatic Nucleic Acid
tctgcaaaggctagctacaacgacttggcct

SEQ ID NO: 2532 - DNA, 31 bp, Artificial Sequence
  Description of Artificial Sequence:  Enzymatic Nucleic Acid
aagttctgggctagctacaacgaaaatcttg

SEQ ID NO: 2533 - DNA, 31 bp, Artificial Sequence
  Description of Artificial Sequence:  Enzymatic Nucleic Acid
tccacaagggctagctacaacgatctgcaaa

SEQ ID NO: 2534 - DNA, 31 bp, Artificial Sequence
  Description of Artificial Sequence:  Enzymatic Nucleic Acid
tttttccaggctagctacaacgaaagttctg

SEQ ID NO: 2535 - DNA, 31 bp, Artificial Sequence
  Description of Artificial Sequence:  Enzymatic Nucleic Acid
tcacctagggctagctacaacgattttccac

SEQ ID NO: 2536 - DNA, 31 bp, Artificial Sequence
  Description of Artificial Sequence:  Enzymatic Nucleic Acid
gcaaatcaggctagctacaacgactagtttt

SEQ ID NO: 2537 - DNA, 31 bp, Artificial Sequence
  Description of Artificial Sequence:  Enzymatic Nucleic Acid
gaagcaaaggctagctacaacgacacctagt

SEQ ID NO: 2538 - DNA, 31 bp, Artificial Sequence
  Description of Artificial Sequence:  Enzymatic Nucleic Acid
gcttgaagggctagctacaacgaaaatcacc

SEQ ID NO: 2539 - DNA, 31 bp, Artificial Sequence
  Description of Artificial Sequence:  Enzymatic Nucleic Acid
tacatttgggctagctacaacgattgaagca

SEQ ID NO: 2540 - DNA, 31 bp, Artificial Sequence
  Description of Artificial Sequence:  Enzymatic Nucleic Acid
gttgtacaggctagctacaacgattgcttga

SEQ ID NO: 2541 - DNA, 31 bp, Artificial Sequence
  Description of Artificial Sequence:  Enzymatic Nucleic Acid
ctgttgtaggctagctacaacgaatttgctt

SEQ ID NO: 2542 - DNA, 31 bp, Artificial Sequence
  Description of Artificial Sequence:  Enzymatic Nucleic Acid
tcctgttgggctagctacaacgaacatttgc

SEQ ID NO: 2543 - DNA, 31 bp, Artificial Sequence
  Description of Artificial Sequence:  Enzymatic Nucleic Acid
ccatcctgggctagctacaacgatgtacatt

SEQ ID NO: 2544 - DNA, 31 bp, Artificial Sequence
  Description of Artificial Sequence:  Enzymatic Nucleic Acid
ctttaccaggctagctacaacgacctgttgt

SEQ ID NO: 2545 - DNA, 31 bp, Artificial Sequence
  Description of Artificial Sequence:  Enzymatic Nucleic Acid
agtctttaggctagctacaacgacatcctgt

SEQ ID NO: 2546 - DNA, 31 bp, Artificial Sequence
  Description of Artificial Sequence:  Enzymatic Nucleic Acid
ggatgtagggctagctacaacgactttacca

SEQ ID NO: 2547 - DNA, 31 bp, Artificial Sequence
  Description of Artificial Sequence:  Enzymatic Nucleic Acid
ttgggatgggctagctacaacgaagtcttta

SEQ ID NO: 2548 - DNA, 31 bp, Artificial Sequence
  Description of Artificial Sequence:  Enzymatic Nucleic Acid
gattgggaggctagctacaacgagtagtctt

SEQ ID NO: 2549 - DNA, 31 bp, Artificial Sequence
  Description of Artificial Sequence:  Enzymatic Nucleic Acid
ggcattgaggctagctacaacgatgggatgt

SEQ ID NO: 2550 - DNA, 31 bp, Artificial Sequence
  Description of Artificial Sequence:  Enzymatic Nucleic Acid
gtatggcaggctagctacaacgatgattggg

SEQ ID NO: 2551 - DNA, 31 bp, Artificial Sequence
  Description of Artificial Sequence:  Enzymatic Nucleic Acid
cagtatggggctagctacaacgaattgattg

SEQ ID NO: 2552 - DNA, 31 bp, Artificial Sequence
  Description of Artificial Sequence:  Enzymatic Nucleic Acid
tgtcagtaggctagctacaacgaggcattga

SEQ ID NO: 2553 - DNA, 31 bp, Artificial Sequence
  Description of Artificial Sequence:  Enzymatic Nucleic Acid
cctgtcagggctagctacaacgaatggcatt

SEQ ID NO: 2554 - DNA, 31 bp, Artificial Sequence
  Description of Artificial Sequence:  Enzymatic Nucleic Acid
atttcctgggctagctacaacgacagtatgg

SEQ ID NO: 2555 - DNA, 31 bp, Artificial Sequence
  Description of Artificial Sequence:  Enzymatic Nucleic Acid
acccactaggctagctacaacgattcctgtc

SEQ ID NO: 2556 - DNA, 31 bp, Artificial Sequence
  Description of Artificial Sequence:  Enzymatic Nucleic Acid
taaacccaggctagctacaacgatatttcct

SEQ ID NO: 2557 - DNA, 31 bp, Artificial Sequence
  Description of Artificial Sequence:  Enzymatic Nucleic Acid
tatgtaaaggctagctacaacgaccactatt

SEQ ID NO: 2558 - DNA, 31 bp, Artificial Sequence
  Description of Artificial Sequence:  Enzymatic Nucleic Acid
tgagtatgggctagctacaacgaaaacccac

SEQ ID NO: 2559 - DNA, 31 bp, Artificial Sequence
  Description of Artificial Sequence:  Enzymatic Nucleic Acid
gttgagtaggctagctacaacgagtaaaccc

SEQ ID NO: 2560 - DNA, 31 bp, Artificial Sequence
  Description of Artificial Sequence:  Enzymatic Nucleic Acid
gagttgagggctagctacaacgaatgtaaac

SEQ ID NO: 2561 - DNA, 31 bp, Artificial Sequence
  Description of Artificial Sequence:  Enzymatic Nucleic Acid
ggcaggagggctagctacaacgatgagtatg

SEQ ID NO: 2562 - DNA, 31 bp, Artificial Sequence
  Description of Artificial Sequence:  Enzymatic Nucleic Acid
agagaaggggctagctacaacgaaggagttg

SEQ ID NO: 2563 - DNA, 31 bp, Artificial Sequence
  Description of Artificial Sequence:  Enzymatic Nucleic Acid
tgaagaagggctagctacaacgacctcagag

SEQ ID NO: 2564 - DNA, 31 bp, Artificial Sequence
  Description of Artificial Sequence:  Enzymatic Nucleic Acid
ctgaaataggctagctacaacgatttccttg

SEQ ID NO: 2565 - DNA, 31 bp, Artificial Sequence
  Description of Artificial Sequence:  Enzymatic Nucleic Acid
agctgaaaggctagctacaacgaactttcct

SEQ ID NO: 2566 - DNA, 31 bp, Artificial Sequence
  Description of Artificial Sequence:  Enzymatic Nucleic Acid
cttcggagggctagctacaacgatgaaatac

SEQ ID NO: 2567 - DNA, 31 bp, Artificial Sequence
  Description of Artificial Sequence:  Enzymatic Nucleic Acid
gaattaaaggctagctacaacgattcggagc

SEQ ID NO: 2568 - DNA, 31 bp, Artificial Sequence
  Description of Artificial Sequence:  Enzymatic Nucleic Acid
ttcctgaaggctagctacaacgataaacttc

SEQ ID NO: 2569 - DNA, 31 bp, Artificial Sequence
  Description of Artificial Sequence:  Enzymatic Nucleic Acid
catcagagggctagctacaacgattcctgaa

SEQ ID NO: 2570 - DNA, 31 bp, Artificial Sequence
  Description of Artificial Sequence:  Enzymatic Nucleic Acid
tgacatcaggctagctacaacgacagagctt

SEQ ID NO: 2571 - DNA, 31 bp, Artificial Sequence
  Description of Artificial Sequence:  Enzymatic Nucleic Acid
atctgacaggctagctacaacgacatcagag

SEQ ID NO: 2572 - DNA, 31 bp, Artificial Sequence
  Description of Artificial Sequence:  Enzymatic Nucleic Acid
atatctgaggctagctacaacgaatcatcag

SEQ ID NO: 2573 - DNA, 31 bp, Artificial Sequence
  Description of Artificial Sequence:  Enzymatic Nucleic Acid
tttacataggctagctacaacgactgacatc

SEQ ID NO: 2574 - DNA, 31 bp, Artificial Sequence
  Description of Artificial Sequence:  Enzymatic Nucleic Acid
catttacaggctagctacaacgaatctgaca

SEQ ID NO: 2575 - DNA, 31 bp, Artificial Sequence
  Description of Artificial Sequence:  Enzymatic Nucleic Acid
agcatttaggctagctacaacgaatatctga

SEQ ID NO: 2576 - DNA, 31 bp, Artificial Sequence
  Description of Artificial Sequence:  Enzymatic Nucleic Acid
tgaaagcaggctagctacaacgattacatat

SEQ ID NO: 2577 - DNA, 31 bp, Artificial Sequence
  Description of Artificial Sequence:  Enzymatic Nucleic Acid
cttgaaagggctagctacaacgaatttacat

SEQ ID NO: 2578 - DNA, 31 bp, Artificial Sequence
  Description of Artificial Sequence:  Enzymatic Nucleic Acid
ctcatgaaggctagctacaacgattgaaagc

SEQ ID NO: 2579 - DNA, 31 bp, Artificial Sequence
  Description of Artificial Sequence:  Enzymatic Nucleic Acid
caggctcaggctagctacaacgagaacttga

SEQ ID NO: 2580 - DNA, 31 bp, Artificial Sequence
  Description of Artificial Sequence:  Enzymatic Nucleic Acid
tttccaggggctagctacaacgatcatgaac

SEQ ID NO: 2581 - DNA, 31 bp, Artificial Sequence
  Description of Artificial Sequence:  Enzymatic Nucleic Acid
ggttttgaggctagctacaacgatctttcca

SEQ ID NO: 2582 - DNA, 31 bp, Artificial Sequence
  Description of Artificial Sequence:  Enzymatic Nucleic Acid
ttcaaaggggctagctacaacgatttgattc

SEQ ID NO: 2583 - DNA, 31 bp, Artificial Sequence
  Description of Artificial Sequence:  Enzymatic Nucleic Acid
ggtaaaagggctagctacaacgatcttcaaa

SEQ ID NO: 2584 - DNA, 31 bp, Artificial Sequence
  Description of Artificial Sequence:  Enzymatic Nucleic Acid
gcattcggggctagctacaacgaaaaagttc

SEQ ID NO: 2585 - DNA, 31 bp, Artificial Sequence
  Description of Artificial Sequence:  Enzymatic Nucleic Acid
aggtggcaggctagctacaacgatcggtaaa

SEQ ID NO: 2586 - DNA, 31 bp, Artificial Sequence
  Description of Artificial Sequence:  Enzymatic Nucleic Acid
ggaggtggggctagctacaacgaattcggta

SEQ ID NO: 2587 - DNA, 31 bp, Artificial Sequence
  Description of Artificial Sequence:  Enzymatic Nucleic Acid
catggaggggctagctacaacgaggcattcg

SEQ ID NO: 2588 - DNA, 31 bp, Artificial Sequence
  Description of Artificial Sequence:  Enzymatic Nucleic Acid
atcaaacaggctagctacaacgaggaggtgg

SEQ ID NO: 2589 - DNA, 31 bp, Artificial Sequence
  Description of Artificial Sequence:  Enzymatic Nucleic Acid
tcatcaaaggctagctacaacgaatggaggt

SEQ ID NO: 2590 - DNA, 31 bp, Artificial Sequence
  Description of Artificial Sequence:  Enzymatic Nucleic Acid
ggtagtcaggctagctacaacgacaaacatg

SEQ ID NO: 2591 - DNA, 31 bp, Artificial Sequence
  Description of Artificial Sequence:  Enzymatic Nucleic Acid
cctggtagggctagctacaacgacatcaaac

SEQ ID NO: 2592 - DNA, 31 bp, Artificial Sequence
  Description of Artificial Sequence:  Enzymatic Nucleic Acid
cgccctggggctagctacaacgaagtcatca

SEQ ID NO: 2593 - DNA, 31 bp, Artificial Sequence
  Description of Artificial Sequence:  Enzymatic Nucleic Acid
tgctgtcgggctagctacaacgacctggtag

SEQ ID NO: 2594 - DNA, 31 bp, Artificial Sequence
  Description of Artificial Sequence:  Enzymatic Nucleic Acid
tgctgctgggctagctacaacgacgccctgg

SEQ ID NO: 2595 - DNA, 31 bp, Artificial Sequence
  Description of Artificial Sequence:  Enzymatic Nucleic Acid
gagtgctgggctagctacaacgatgtcgccc

SEQ ID NO: 2596 - DNA, 31 bp, Artificial Sequence
  Description of Artificial Sequence:  Enzymatic Nucleic Acid
acagagtgggctagctacaacgatgctgtcg

SEQ ID NO: 2597 - DNA, 31 bp, Artificial Sequence
  Description of Artificial Sequence:  Enzymatic Nucleic Acid
caacagagggctagctacaacgagctgctgt

SEQ ID NO: 2598 - DNA, 31 bp, Artificial Sequence
  Description of Artificial Sequence:  Enzymatic Nucleic Acid
gaggccaaggctagctacaacgaagagtgct

SEQ ID NO: 2599 - DNA, 31 bp, Artificial Sequence
  Description of Artificial Sequence:  Enzymatic Nucleic Acid
gggagaggggctagctacaacgacaacagag

SEQ ID NO: 2600 - DNA, 31 bp, Artificial Sequence
  Description of Artificial Sequence:  Enzymatic Nucleic Acid
cttcagcaggctagctacaacgagggagagg

SEQ ID NO: 2601 - DNA, 31 bp, Artificial Sequence
  Description of Artificial Sequence:  Enzymatic Nucleic Acid
cgcttcagggctagctacaacgaatgggaga

SEQ ID NO: 2602 - DNA, 31 bp, Artificial Sequence
  Description of Artificial Sequence:  Enzymatic Nucleic Acid
gtgaagcgggctagctacaacgattcagcat

SEQ ID NO: 2603 - DNA, 31 bp, Artificial Sequence
  Description of Artificial Sequence:  Enzymatic Nucleic Acid
aggtgaagggctagctacaacgagcttcagc

SEQ ID NO: 2604 - DNA, 31 bp, Artificial Sequence
  Description of Artificial Sequence:  Enzymatic Nucleic Acid
agtccaggggctagctacaacgagaagcgct

SEQ ID NO: 2605 - DNA, 31 bp, Artificial Sequence
  Description of Artificial Sequence:  Enzymatic Nucleic Acid
gctgtcagggctagctacaacgaccaggtga

SEQ ID NO: 2606 - DNA, 31 bp, Artificial Sequence
  Description of Artificial Sequence:  Enzymatic Nucleic Acid
gtttgctgggctagctacaacgacagtccag

SEQ ID NO: 2607 - DNA, 31 bp, Artificial Sequence
  Description of Artificial Sequence:  Enzymatic Nucleic Acid
tgggtttgggctagctacaacgatgtcagtc

SEQ ID NO: 2608 - DNA, 31 bp, Artificial Sequence
  Description of Artificial Sequence:  Enzymatic Nucleic Acid
gccttgggggctagctacaacgattgctgtc

SEQ ID NO: 2609 - DNA, 31 bp, Artificial Sequence
  Description of Artificial Sequence:  Enzymatic Nucleic Acid
gagcgaggggctagctacaacgacttgggtt

SEQ ID NO: 2610 - DNA, 31 bp, Artificial Sequence
  Description of Artificial Sequence:  Enzymatic Nucleic Acid
atcttgagggctagctacaacgagaggcctt

SEQ ID NO: 2611 - DNA, 31 bp, Artificial Sequence
  Description of Artificial Sequence:  Enzymatic Nucleic Acid
caagtcaaggctagctacaacgacttgagcg

SEQ ID NO: 2612 - DNA, 31 bp, Artificial Sequence
  Description of Artificial Sequence:  Enzymatic Nucleic Acid
ctctcaagggctagctacaacgacaatcttg

SEQ ID NO: 2613 - DNA, 31 bp, Artificial Sequence
  Description of Artificial Sequence:  Enzymatic Nucleic Acid
actggttaggctagctacaacgatctcaagt

SEQ ID NO: 2614 - DNA, 31 bp, Artificial Sequence
  Description of Artificial Sequence:  Enzymatic Nucleic Acid
tttactggggctagctacaacgatactctca

SEQ ID NO: 2615 - DNA, 31 bp, Artificial Sequence
  Description of Artificial Sequence:  Enzymatic Nucleic Acid
tacttttaggctagctacaacgatggttact

SEQ ID NO: 2616 - DNA, 31 bp, Artificial Sequence
  Description of Artificial Sequence:  Enzymatic Nucleic Acid
actccttaggctagctacaacgattttactg

SEQ ID NO: 2617 - DNA, 31 bp, Artificial Sequence
  Description of Artificial Sequence:  Enzymatic Nucleic Acid
agccccgaggctagctacaacgatccttact

SEQ ID NO: 2618 - DNA, 31 bp, Artificial Sequence
  Description of Artificial Sequence:  Enzymatic Nucleic Acid
tcagacagggctagctacaacgacccgactc

SEQ ID NO: 2619 - DNA, 31 bp, Artificial Sequence
  Description of Artificial Sequence:  Enzymatic Nucleic Acid
acatcagaggctagctacaacgaagccccga

SEQ ID NO: 2620 - DNA, 31 bp, Artificial Sequence
  Description of Artificial Sequence:  Enzymatic Nucleic Acid
tgctgacaggctagctacaacgacagacagc

SEQ ID NO: 2621 - DNA, 31 bp, Artificial Sequence
  Description of Artificial Sequence:  Enzymatic Nucleic Acid
cctgctgaggctagctacaacgaatcagaca

SEQ ID NO: 2622 - DNA, 31 bp, Artificial Sequence
  Description of Artificial Sequence:  Enzymatic Nucleic Acid
tgggcctgggctagctacaacgatgacatca

SEQ ID NO: 2623 - DNA, 31 bp, Artificial Sequence
  Description of Artificial Sequence:  Enzymatic Nucleic Acid
aaactgggggctagctacaacgactgctgac

SEQ ID NO: 2624 - DNA, 31 bp, Artificial Sequence
  Description of Artificial Sequence:  Enzymatic Nucleic Acid
ggcagaaaggctagctacaacgatgggcctg

SEQ ID NO: 2625 - DNA, 31 bp, Artificial Sequence
  Description of Artificial Sequence:  Enzymatic Nucleic Acid
tggaatggggctagctacaacgaagaaactg

SEQ ID NO: 2626 - DNA, 31 bp, Artificial Sequence
  Description of Artificial Sequence:  Enzymatic Nucleic Acid
agctggaaggctagctacaacgaggcagaaa

SEQ ID NO: 2627 - DNA, 31 bp, Artificial Sequence
  Description of Artificial Sequence:  Enzymatic Nucleic Acid
gcccacagggctagctacaacgatggaatgg

SEQ ID NO: 2628 - DNA, 31 bp, Artificial Sequence
  Description of Artificial Sequence:  Enzymatic Nucleic Acid
cgtgcccaggctagctacaacgaagctggaa

SEQ ID NO: 2629 - DNA, 31 bp, Artificial Sequence
  Description of Artificial Sequence:  Enzymatic Nucleic Acid
ctgacgtgggctagctacaacgaccacagct

SEQ ID NO: 2630 - DNA, 31 bp, Artificial Sequence
  Description of Artificial Sequence:  Enzymatic Nucleic Acid
cgctgacgggctagctacaacgagcccacag

SEQ ID NO: 2631 - DNA, 31 bp, Artificial Sequence
  Description of Artificial Sequence:  Enzymatic Nucleic Acid
ttcgctgaggctagctacaacgagtgcccac

SEQ ID NO: 2632 - DNA, 31 bp, Artificial Sequence
  Description of Artificial Sequence:  Enzymatic Nucleic Acid
tgccttcgggctagctacaacgatgacgtgc

SEQ ID NO: 2633 - DNA, 31 bp, Artificial Sequence
  Description of Artificial Sequence:  Enzymatic Nucleic Acid
tgcgcttgggctagctacaacgacttcgctg

SEQ ID NO: 2634 - DNA, 31 bp, Artificial Sequence
  Description of Artificial Sequence:  Enzymatic Nucleic Acid
aacctgcgggctagctacaacgattgccttc

SEQ ID NO: 2635 - DNA, 31 bp, Artificial Sequence
  Description of Artificial Sequence:  Enzymatic Nucleic Acid
tgaacctgggctagctacaacgagcttgcct

SEQ ID NO: 2636 - DNA, 31 bp, Artificial Sequence
  Description of Artificial Sequence:  Enzymatic Nucleic Acid
taggtgaaggctagctacaacgactgcgctt

SEQ ID NO: 2637 - DNA, 31 bp, Artificial Sequence
  Description of Artificial Sequence:  Enzymatic Nucleic Acid
gtcgtaggggctagctacaacgagaacctgc

SEQ ID NO: 2638 - DNA, 31 bp, Artificial Sequence
  Description of Artificial Sequence:  Enzymatic Nucleic Acid
cgtggtcgggctagctacaacgaaggtgaac

SEQ ID NO: 2639 - DNA, 31 bp, Artificial Sequence
  Description of Artificial Sequence:  Enzymatic Nucleic Acid
cagcgtggggctagctacaacgacgtaggtg

SEQ ID NO: 2640 - DNA, 31 bp, Artificial Sequence
  Description of Artificial Sequence:  Enzymatic Nucleic Acid
gctcagcgggctagctacaacgaggtcgtag

SEQ ID NO: 2641 - DNA, 31 bp, Artificial Sequence
  Description of Artificial Sequence:  Enzymatic Nucleic Acid
cagctcagggctagctacaacgagtggtcgt

SEQ ID NO: 2642 - DNA, 31 bp, Artificial Sequence
  Description of Artificial Sequence:  Enzymatic Nucleic Acid
ctttccagggctagctacaacgatcagcgtg

SEQ ID NO: 2643 - DNA, 31 bp, Artificial Sequence
  Description of Artificial Sequence:  Enzymatic Nucleic Acid
gcacgcgaggctagctacaacgatttccttt

SEQ ID NO: 2644 - DNA, 31 bp, Artificial Sequence
  Description of Artificial Sequence:  Enzymatic Nucleic Acid
gcagcacgggctagctacaacgagattttcc

SEQ ID NO: 2645 - DNA, 31 bp, Artificial Sequence
  Description of Artificial Sequence:  Enzymatic Nucleic Acid
gagcagcaggctagctacaacgagcgatttt

SEQ ID NO: 2646 - DNA, 31 bp, Artificial Sequence
  Description of Artificial Sequence:  Enzymatic Nucleic Acid
gggagcagggctagctacaacgaacgcgatt

SEQ ID NO: 2647 - DNA, 31 bp, Artificial Sequence
  Description of Artificial Sequence:  Enzymatic Nucleic Acid
gcggggagggctagctacaacgaagcacgcg

SEQ ID NO: 2648 - DNA, 31 bp, Artificial Sequence
  Description of Artificial Sequence:  Enzymatic Nucleic Acid
tctgggggggctagctacaacgaggggagca

SEQ ID NO: 2649 - DNA, 31 bp, Artificial Sequence
  Description of Artificial Sequence:  Enzymatic Nucleic Acid
agttgtagggctagctacaacgactgggggc

SEQ ID NO: 2650 - DNA, 31 bp, Artificial Sequence
  Description of Artificial Sequence:  Enzymatic Nucleic Acid
ccgagttgggctagctacaacgaagtctggg

SEQ ID NO: 2651 - DNA, 31 bp, Artificial Sequence
  Description of Artificial Sequence:  Enzymatic Nucleic Acid
ccaccgagggctagctacaacgatgtagtct

SEQ ID NO: 2652 - DNA, 31 bp, Artificial Sequence
  Description of Artificial Sequence:  Enzymatic Nucleic Acid
caggaccaggctagctacaacgacgagttgt

SEQ ID NO: 2653 - DNA, 31 bp, Artificial Sequence
  Description of Artificial Sequence:  Enzymatic Nucleic Acid
gtacaggaggctagctacaacgacaccgagt

SEQ ID NO: 2654 - DNA, 31 bp, Artificial Sequence
  Description of Artificial Sequence:  Enzymatic Nucleic Acid
gtggagtaggctagctacaacgaaggaccac

SEQ ID NO: 2655 - DNA, 31 bp, Artificial Sequence
  Description of Artificial Sequence:  Enzymatic Nucleic Acid
gggtggagggctagctacaacgaacaggacc

SEQ ID NO: 2656 - DNA, 31 bp, Artificial Sequence
  Description of Artificial Sequence:  Enzymatic Nucleic Acid
gggtggggggctagctacaacgaggagtaca

SEQ ID NO: 2657 - DNA, 31 bp, Artificial Sequence
  Description of Artificial Sequence:  Enzymatic Nucleic Acid
tagatgggggctagctacaacgaggggtgga

SEQ ID NO: 2658 - DNA, 31 bp, Artificial Sequence
  Description of Artificial Sequence:  Enzymatic Nucleic Acid
actctagaggctagctacaacgagggtgggg

SEQ ID NO: 2659 - DNA, 31 bp, Artificial Sequence
  Description of Artificial Sequence:  Enzymatic Nucleic Acid
gtgtcaaaggctagctacaacgatctagatg

SEQ ID NO: 2660 - DNA, 31 bp, Artificial Sequence
  Description of Artificial Sequence:  Enzymatic Nucleic Acid
gcttcgtgggctagctacaacgacaaactct

SEQ ID NO: 2661 - DNA, 31 bp, Artificial Sequence
  Description of Artificial Sequence:  Enzymatic Nucleic Acid
aggcttcgggctagctacaacgagtcaaact

SEQ ID NO: 2662 - DNA, 31 bp, Artificial Sequence
  Description of Artificial Sequence:  Enzymatic Nucleic Acid
aaataaggggctagctacaacgattcgtgtc

SEQ ID NO: 2663 - DNA, 31 bp, Artificial Sequence
  Description of Artificial Sequence:  Enzymatic Nucleic Acid
tctagaaaggctagctacaacgaaaggcttc

SEQ ID NO: 2664 - DNA, 31 bp, Artificial Sequence
  Description of Artificial Sequence:  Enzymatic Nucleic Acid
cacatgtgggctagctacaacgattctagaa

SEQ ID NO: 2665 - DNA, 31 bp, Artificial Sequence
  Description of Artificial Sequence:  Enzymatic Nucleic Acid
tacacatgggctagctacaacgagcttctag

SEQ ID NO: 2666 - DNA, 31 bp, Artificial Sequence
  Description of Artificial Sequence:  Enzymatic Nucleic Acid
aatacacaggctagctacaacgagtgcttct

SEQ ID NO: 2667 - DNA, 31 bp, Artificial Sequence
  Description of Artificial Sequence:  Enzymatic Nucleic Acid
taaatacaggctagctacaacgaatgtgctt

SEQ ID NO: 2668 - DNA, 31 bp, Artificial Sequence
  Description of Artificial Sequence:  Enzymatic Nucleic Acid
tataaataggctagctacaacgaacatgtgc

SEQ ID NO: 2669 - DNA, 31 bp, Artificial Sequence
  Description of Artificial Sequence:  Enzymatic Nucleic Acid
ggtataaaggctagctacaacgaacacatgt

SEQ ID NO: 2670 - DNA, 31 bp, Artificial Sequence
  Description of Artificial Sequence:  Enzymatic Nucleic Acid
tgggggtaggctagctacaacgaaaatacac

SEQ ID NO: 2671 - DNA, 31 bp, Artificial Sequence
  Description of Artificial Sequence:  Enzymatic Nucleic Acid
cctgggggggctagctacaacgaataaatac

SEQ ID NO: 2672 - DNA, 31 bp, Artificial Sequence
  Description of Artificial Sequence:  Enzymatic Nucleic Acid
aaagctagggctagctacaacgattcctggg

SEQ ID NO: 2673 - DNA, 31 bp, Artificial Sequence
  Description of Artificial Sequence:  Enzymatic Nucleic Acid
ggcaaaagggctagctacaacgatagtttcc

SEQ ID NO: 2674 - DNA, 31 bp, Artificial Sequence
  Description of Artificial Sequence:  Enzymatic Nucleic Acid
aatactggggctagctacaacgaaaaagcta

SEQ ID NO: 2675 - DNA, 31 bp, Artificial Sequence
  Description of Artificial Sequence:  Enzymatic Nucleic Acid
gcataataggctagctacaacgatggcaaaa

SEQ ID NO: 2676 - DNA, 31 bp, Artificial Sequence
  Description of Artificial Sequence:  Enzymatic Nucleic Acid
atgcataaggctagctacaacgaactggcaa

SEQ ID NO: 2677 - DNA, 31 bp, Artificial Sequence
  Description of Artificial Sequence:  Enzymatic Nucleic Acid
tatatgcaggctagctacaacgaaatactgg

SEQ ID NO: 2678 - DNA, 31 bp, Artificial Sequence
  Description of Artificial Sequence:  Enzymatic Nucleic Acid
tatatatgggctagctacaacgaataatact

SEQ ID NO: 2679 - DNA, 31 bp, Artificial Sequence
  Description of Artificial Sequence:  Enzymatic Nucleic Acid
cttatataggctagctacaacgagcataata

SEQ ID NO: 2680 - DNA, 31 bp, Artificial Sequence
  Description of Artificial Sequence:  Enzymatic Nucleic Acid
aacttataggctagctacaacgaatgcataa

SEQ ID NO: 2681 - DNA, 31 bp, Artificial Sequence
  Description of Artificial Sequence:  Enzymatic Nucleic Acid
taaacttaggctagctacaacgaatatgcat

SEQ ID NO: 2682 - DNA, 31 bp, Artificial Sequence
  Description of Artificial Sequence:  Enzymatic Nucleic Acid
ggtgtaaaggctagctacaacgattatatat

SEQ ID NO: 2683 - DNA, 31 bp, Artificial Sequence
  Description of Artificial Sequence:  Enzymatic Nucleic Acid
taaaggtgggctagctacaacgaaaacttat

SEQ ID NO: 2684 - DNA, 31 bp, Artificial Sequence
  Description of Artificial Sequence:  Enzymatic Nucleic Acid
gataaaggggctagctacaacgagtaaactt

SEQ ID NO: 2685 - DNA, 31 bp, Artificial Sequence
  Description of Artificial Sequence:  Enzymatic Nucleic Acid
tggaaagaggctagctacaacgaaaaggtgt

SEQ ID NO: 2686 - DNA, 31 bp, Artificial Sequence
  Description of Artificial Sequence:  Enzymatic Nucleic Acid
ggctcccaggctagctacaacgaggaaagat

SEQ ID NO: 2687 - DNA, 31 bp, Artificial Sequence
  Description of Artificial Sequence:  Enzymatic Nucleic Acid
gcagctggggctagctacaacgatcccatgg

SEQ ID NO: 2688 - DNA, 31 bp, Artificial Sequence
  Description of Artificial Sequence:  Enzymatic Nucleic Acid
aaaagcagggctagctacaacgatggctccc

SEQ ID NO: 2689 - DNA, 31 bp, Artificial Sequence
  Description of Artificial Sequence:  Enzymatic Nucleic Acid
acaaaaagggctagctacaacgaagctggct

SEQ ID NO: 2690 - DNA, 31 bp, Artificial Sequence
  Description of Artificial Sequence:  Enzymatic Nucleic Acid
aaaaatcaggctagctacaacgaaaaaagca

SEQ ID NO: 2691 - DNA, 31 bp, Artificial Sequence
  Description of Artificial Sequence:  Enzymatic Nucleic Acid
taaaaaaaggctagctacaacgacacaaaaa

SEQ ID NO: 2692 - DNA, 31 bp, Artificial Sequence
  Description of Artificial Sequence:  Enzymatic Nucleic Acid
aagcactaggctagctacaacgataaaaaaa

SEQ ID NO: 2693 - DNA, 31 bp, Artificial Sequence
  Description of Artificial Sequence:  Enzymatic Nucleic Acid
aaaaagcaggctagctacaacgatattaaaa

SEQ ID NO: 2694 - DNA, 31 bp, Artificial Sequence
  Description of Artificial Sequence:  Enzymatic Nucleic Acid
aaaaaaagggctagctacaacgaactattaa

SEQ ID NO: 2695 - DNA, 31 bp, Artificial Sequence
  Description of Artificial Sequence:  Enzymatic Nucleic Acid
cttgttagggctagctacaacgacaaaaaaa

SEQ ID NO: 2696 - DNA, 31 bp, Artificial Sequence
  Description of Artificial Sequence:  Enzymatic Nucleic Acid
cattcttgggctagctacaacgatagtcaaa

SEQ ID NO: 2697 - DNA, 31 bp, Artificial Sequence
  Description of Artificial Sequence:  Enzymatic Nucleic Acid
gagttacaggctagctacaacgatcttgtta

SEQ ID NO: 2698 - DNA, 31 bp, Artificial Sequence
  Description of Artificial Sequence:  Enzymatic Nucleic Acid
tggagttaggctagctacaacgaattcttgt

SEQ ID NO: 2699 - DNA, 31 bp, Artificial Sequence
  Description of Artificial Sequence:  Enzymatic Nucleic Acid
atctggagggctagctacaacgatacattct

SEQ ID NO: 2700 - DNA, 31 bp, Artificial Sequence
  Description of Artificial Sequence:  Enzymatic Nucleic Acid
tttctctaggctagctacaacgactggagtt

SEQ ID NO: 2701 - DNA, 31 bp, Artificial Sequence
  Description of Artificial Sequence:  Enzymatic Nucleic Acid
tgtcactaggctagctacaacgattctctat

SEQ ID NO: 2702 - DNA, 31 bp, Artificial Sequence
  Description of Artificial Sequence:  Enzymatic Nucleic Acid
acttgtcaggctagctacaacgatatttctc

SEQ ID NO: 2703 - DNA, 31 bp, Artificial Sequence
  Description of Artificial Sequence:  Enzymatic Nucleic Acid
ttcacttgggctagctacaacgacactattt

SEQ ID NO: 2704 - DNA, 31 bp, Artificial Sequence
  Description of Artificial Sequence:  Enzymatic Nucleic Acid
gttcttcaggctagctacaacgattgtcact

SEQ ID NO: 2705 - DNA, 31 bp, Artificial Sequence
  Description of Artificial Sequence:  Enzymatic Nucleic Acid
cagtagtgggctagctacaacgatcttcact

SEQ ID NO: 2706 - DNA, 31 bp, Artificial Sequence
  Description of Artificial Sequence:  Enzymatic Nucleic Acid
agcagtagggctagctacaacgagttcttca

SEQ ID NO: 2707 - DNA, 31 bp, Artificial Sequence
  Description of Artificial Sequence:  Enzymatic Nucleic Acid
tttagcagggctagctacaacgaagtgttct

SEQ ID NO: 2708 - DNA, 31 bp, Artificial Sequence
  Description of Artificial Sequence:  Enzymatic Nucleic Acid
ggatttagggctagctacaacgaagtagtgt

SEQ ID NO: 2709 - DNA, 31 bp, Artificial Sequence
  Description of Artificial Sequence:  Enzymatic Nucleic Acid
catgaggaggctagctacaacgattagcagt

SEQ ID NO: 2710 - DNA, 31 bp, Artificial Sequence
  Description of Artificial Sequence:  Enzymatic Nucleic Acid
gagtaacaggctagctacaacgagaggattt

SEQ ID NO: 2711 - DNA, 31 bp, Artificial Sequence
  Description of Artificial Sequence:  Enzymatic Nucleic Acid
ctgagtaaggctagctacaacgaatgaggat

SEQ ID NO: 2712 - DNA, 31 bp, Artificial Sequence
  Description of Artificial Sequence:  Enzymatic Nucleic Acid
acactgagggctagctacaacgaaacatgag

SEQ ID NO: 2713 - DNA, 31 bp, Artificial Sequence
  Description of Artificial Sequence:  Enzymatic Nucleic Acid
ctctaacaggctagctacaacgatgagtaac

SEQ ID NO: 2714 - DNA, 31 bp, Artificial Sequence
  Description of Artificial Sequence:  Enzymatic Nucleic Acid
ttctctaaggctagctacaacgaactgagta

SEQ ID NO: 2715 - DNA, 31 bp, Artificial Sequence
  Description of Artificial Sequence:  Enzymatic Nucleic Acid
aggaaggaggctagctacaacgattctctaa

SEQ ID NO: 2716 - DNA, 31 bp, Artificial Sequence
  Description of Artificial Sequence:  Enzymatic Nucleic Acid
tcattgggggctagctacaacgattaggaag

SEQ ID NO: 2717 - DNA, 31 bp, Artificial Sequence
  Description of Artificial Sequence:  Enzymatic Nucleic Acid
ggaagtcaggctagctacaacgatgggttta

SEQ ID NO: 2718 - DNA, 31 bp, Artificial Sequence
  Description of Artificial Sequence:  Enzymatic Nucleic Acid
cagggaagggctagctacaacgacattgggt

SEQ ID NO: 2719 - DNA, 31 bp, Artificial Sequence
  Description of Artificial Sequence:  Enzymatic Nucleic Acid
ggttggagggctagctacaacgaagggaagt

SEQ ID NO: 2720 - DNA, 31 bp, Artificial Sequence
  Description of Artificial Sequence:  Enzymatic Nucleic Acid
ggcgggggggctagctacaacgatggagcag

SEQ ID NO: 2721 - DNA, 31 bp, Artificial Sequence
  Description of Artificial Sequence:  Enzymatic Nucleic Acid
tgaggtggggctagctacaacgagggggttg

SEQ ID NO: 2722 - DNA, 31 bp, Artificial Sequence
  Description of Artificial Sequence:  Enzymatic Nucleic Acid
ccctgaggggctagctacaacgaggcggggg

SEQ ID NO: 2723 - DNA, 31 bp, Artificial Sequence
  Description of Artificial Sequence:  Enzymatic Nucleic Acid
cctgcgtgggctagctacaacgacctgaggt

SEQ ID NO: 2724 - DNA, 31 bp, Artificial Sequence
  Description of Artificial Sequence:  Enzymatic Nucleic Acid
gtcctgcgggctagctacaacgagccctgag

SEQ ID NO: 2725 - DNA, 31 bp, Artificial Sequence
  Description of Artificial Sequence:  Enzymatic Nucleic Acid
tggtcctgggctagctacaacgagtgccctg

SEQ ID NO: 2726 - DNA, 31 bp, Artificial Sequence
  Description of Artificial Sequence:  Enzymatic Nucleic Acid
caaactggggctagctacaacgacctgcgtg

SEQ ID NO: 2727 - DNA, 31 bp, Artificial Sequence
  Description of Artificial Sequence:  Enzymatic Nucleic Acid
caatcaaaggctagctacaacgatggtcctg

SEQ ID NO: 2728 - DNA, 31 bp, Artificial Sequence
  Description of Artificial Sequence:  Enzymatic Nucleic Acid
ctcctcaaggctagctacaacgacaaactgg

SEQ ID NO: 2729 - DNA, 31 bp, Artificial Sequence
  Description of Artificial Sequence:  Enzymatic Nucleic Acid
cagtgcagggctagctacaacgatcctcaat

SEQ ID NO: 2730 - DNA, 31 bp, Artificial Sequence
  Description of Artificial Sequence:  Enzymatic Nucleic Acid
gatcagtgggctagctacaacgaagctcctc

SEQ ID NO: 2731 - DNA, 31 bp, Artificial Sequence
  Description of Artificial Sequence:  Enzymatic Nucleic Acid
gtgatcagggctagctacaacgagcagctcc

SEQ ID NO: 2732 - DNA, 31 bp, Artificial Sequence
  Description of Artificial Sequence:  Enzymatic Nucleic Acid
ttgggtgaggctagctacaacgacagtgcag

SEQ ID NO: 2733 - DNA, 31 bp, Artificial Sequence
  Description of Artificial Sequence:  Enzymatic Nucleic Acid
gcattgggggctagctacaacgagatcagtg

SEQ ID NO: 2734 - DNA, 31 bp, Artificial Sequence
  Description of Artificial Sequence:  Enzymatic Nucleic Acid
gtgatgcaggctagctacaacgatgggtgat

SEQ ID NO: 2735 - DNA, 31 bp, Artificial Sequence
  Description of Artificial Sequence:  Enzymatic Nucleic Acid
acgtgatgggctagctacaacgaattgggtg

SEQ ID NO: 2736 - DNA, 31 bp, Artificial Sequence
  Description of Artificial Sequence:  Enzymatic Nucleic Acid
gtacgtgaggctagctacaacgagcattggg

SEQ ID NO: 2737 - DNA, 31 bp, Artificial Sequence
  Description of Artificial Sequence:  Enzymatic Nucleic Acid
ggggtacgggctagctacaacgagatgcatt

SEQ ID NO: 2738 - DNA, 31 bp, Artificial Sequence
  Description of Artificial Sequence:  Enzymatic Nucleic Acid
gtggggtaggctagctacaacgagtgatgca

SEQ ID NO: 2739 - DNA, 31 bp, Artificial Sequence
  Description of Artificial Sequence:  Enzymatic Nucleic Acid
cagtggggggctagctacaacgaacgtgatg

SEQ ID NO: 2740 - DNA, 31 bp, Artificial Sequence
  Description of Artificial Sequence:  Enzymatic Nucleic Acid
tggcccagggctagctacaacgaggggtacg

SEQ ID NO: 2741 - DNA, 31 bp, Artificial Sequence
  Description of Artificial Sequence:  Enzymatic Nucleic Acid
agggctggggctagctacaacgaccagtggg

SEQ ID NO: 2742 - DNA, 31 bp, Artificial Sequence
  Description of Artificial Sequence:  Enzymatic Nucleic Acid
ctgcagggggctagctacaacgatggcccag

SEQ ID NO: 2743 - DNA, 31 bp, Artificial Sequence
  Description of Artificial Sequence:  Enzymatic Nucleic Acid
ttgggctgggctagctacaacgaagggctgg

SEQ ID NO: 2744 - DNA, 31 bp, Artificial Sequence
  Description of Artificial Sequence:  Enzymatic Nucleic Acid
gttttgggggctagctacaacgatgcagggc

SEQ ID NO: 2745 - DNA, 31 bp, Artificial Sequence
  Description of Artificial Sequence:  Enzymatic Nucleic Acid
gccctgggggctagctacaacgatttgggct

SEQ ID NO: 2746 - DNA, 31 bp, Artificial Sequence
  Description of Artificial Sequence:  Enzymatic Nucleic Acid
gcttgttgggctagctacaacgacctgggtt

SEQ ID NO: 2747 - DNA, 31 bp, Artificial Sequence
  Description of Artificial Sequence:  Enzymatic Nucleic Acid
cgggcttgggctagctacaacgatgccctgg

SEQ ID NO: 2748 - DNA, 31 bp, Artificial Sequence
  Description of Artificial Sequence:  Enzymatic Nucleic Acid
ctaacgggggctagctacaacgattgttgcc

SEQ ID NO: 2749 - DNA, 31 bp, Artificial Sequence
  Description of Artificial Sequence:  Enzymatic Nucleic Acid
ggggctaaggctagctacaacgagggcttgt

SEQ ID NO: 2750 - DNA, 31 bp, Artificial Sequence
  Description of Artificial Sequence:  Enzymatic Nucleic Acid
ccctggggggctagctacaacgataacgggc

SEQ ID NO: 2751 - DNA, 31 bp, Artificial Sequence
  Description of Artificial Sequence:  Enzymatic Nucleic Acid
gccagtgaggctagctacaacgacccctggg

SEQ ID NO: 2752 - DNA, 31 bp, Artificial Sequence
  Description of Artificial Sequence:  Enzymatic Nucleic Acid
ccagccagggctagctacaacgagatcccct

SEQ ID NO: 2753 - DNA, 31 bp, Artificial Sequence
  Description of Artificial Sequence:  Enzymatic Nucleic Acid
caggccagggctagctacaacgacagtgatc

SEQ ID NO: 2754 - DNA, 31 bp, Artificial Sequence
  Description of Artificial Sequence:  Enzymatic Nucleic Acid
tgctcaggggctagctacaacgacagccagt

SEQ ID NO: 2755 - DNA, 31 bp, Artificial Sequence
  Description of Artificial Sequence:  Enzymatic Nucleic Acid
agatgttgggctagctacaacgatcaggcca

SEQ ID NO: 2756 - DNA, 31 bp, Artificial Sequence
  Description of Artificial Sequence:  Enzymatic Nucleic Acid
ccgagatgggctagctacaacgatgctcagg

SEQ ID NO: 2757 - DNA, 31 bp, Artificial Sequence
  Description of Artificial Sequence:  Enzymatic Nucleic Acid
tcccgagaggctagctacaacgagttgctca

SEQ ID NO: 2758 - DNA, 31 bp, Artificial Sequence
  Description of Artificial Sequence:  Enzymatic Nucleic Acid
ctagaggaggctagctacaacgatcccgaga

SEQ ID NO: 2759 - DNA, 31 bp, Artificial Sequence
  Description of Artificial Sequence:  Enzymatic Nucleic Acid
taggcctgggctagctacaacgatagaggac

SEQ ID NO: 2760 - DNA, 31 bp, Artificial Sequence
  Description of Artificial Sequence:  Enzymatic Nucleic Acid
gtcttaggggctagctacaacgactgctaga

SEQ ID NO: 2761 - DNA, 31 bp, Artificial Sequence
  Description of Artificial Sequence:  Enzymatic Nucleic Acid
ctcacatgggctagctacaacgacttaggcc

SEQ ID NO: 2762 - DNA, 31 bp, Artificial Sequence
  Description of Artificial Sequence:  Enzymatic Nucleic Acid
tcctcacaggctagctacaacgagtcttagg

SEQ ID NO: 2763 - DNA, 31 bp, Artificial Sequence
  Description of Artificial Sequence:  Enzymatic Nucleic Acid
cctcctcaggctagctacaacgaatgtctta

SEQ ID NO: 2764 - DNA, 31 bp, Artificial Sequence
  Description of Artificial Sequence:  Enzymatic Nucleic Acid
gctttttgggctagctacaacgatttttttc

SEQ ID NO: 2765 - DNA, 31 bp, Artificial Sequence
  Description of Artificial Sequence:  Enzymatic Nucleic Acid
ctcccttgggctagctacaacgatttttgct

SEQ ID NO: 2766 - DNA, 31 bp, Artificial Sequence
  Description of Artificial Sequence:  Enzymatic Nucleic Acid
tctcccggggctagctacaacgattctcttt

SEQ ID NO: 2767 - DNA, 31 bp, Artificial Sequence
  Description of Artificial Sequence:  Enzymatic Nucleic Acid
ttctcatgggctagctacaacgacttctccc

SEQ ID NO: 2768 - DNA, 31 bp, Artificial Sequence
  Description of Artificial Sequence:  Enzymatic Nucleic Acid
ctttctcaggctagctacaacgagccttctc

SEQ ID NO: 2769 - DNA, 31 bp, Artificial Sequence
  Description of Artificial Sequence:  Enzymatic Nucleic Acid
gtctcaaaggctagctacaacgatctttctc

SEQ ID NO: 2770 - DNA, 31 bp, Artificial Sequence
  Description of Artificial Sequence:  Enzymatic Nucleic Acid
atggtgcgggctagctacaacgactcaaatt

SEQ ID NO: 2771 - DNA, 31 bp, Artificial Sequence
  Description of Artificial Sequence:  Enzymatic Nucleic Acid
acatggtgggctagctacaacgagtctcaaa

SEQ ID NO: 2772 - DNA, 31 bp, Artificial Sequence
  Description of Artificial Sequence:  Enzymatic Nucleic Acid
ccacatggggctagctacaacgagcgtctca

SEQ ID NO: 2773 - DNA, 31 bp, Artificial Sequence
  Description of Artificial Sequence:  Enzymatic Nucleic Acid
tgcccacaggctagctacaacgaggtgcgtc

SEQ ID NO: 2774 - DNA, 31 bp, Artificial Sequence
  Description of Artificial Sequence:  Enzymatic Nucleic Acid
cgtgcccaggctagctacaacgaatggtgcg

SEQ ID NO: 2775 - DNA, 31 bp, Artificial Sequence
  Description of Artificial Sequence:  Enzymatic Nucleic Acid
cctccgtgggctagctacaacgaccacatgg

SEQ ID NO: 2776 - DNA, 31 bp, Artificial Sequence
  Description of Artificial Sequence:  Enzymatic Nucleic Acid
cccctccgggctagctacaacgagcccacat

SEQ ID NO: 2777 - DNA, 31 bp, Artificial Sequence
  Description of Artificial Sequence:  Enzymatic Nucleic Acid
gagccccgggctagctacaacgaccccctcc

SEQ ID NO: 2778 - DNA, 31 bp, Artificial Sequence
  Description of Artificial Sequence:  Enzymatic Nucleic Acid
ttgctgagggctagctacaacgacccgtccc

SEQ ID NO: 2779 - DNA, 31 bp, Artificial Sequence
  Description of Artificial Sequence:  Enzymatic Nucleic Acid
tggcattgggctagctacaacgatgagcccc

SEQ ID NO: 2780 - DNA, 31 bp, Artificial Sequence
  Description of Artificial Sequence:  Enzymatic Nucleic Acid
aaatggcaggctagctacaacgatgctgagc

SEQ ID NO: 2781 - DNA, 31 bp, Artificial Sequence
  Description of Artificial Sequence:  Enzymatic Nucleic Acid
tgaaatggggctagctacaacgaattgctga

SEQ ID NO: 2782 - DNA, 31 bp, Artificial Sequence
  Description of Artificial Sequence:  Enzymatic Nucleic Acid
cactgaaaggctagctacaacgaggcattgc

SEQ ID NO: 2783 - DNA, 31 bp, Artificial Sequence
  Description of Artificial Sequence:  Enzymatic Nucleic Acid
ggaagccaggctagctacaacgatgaaatgg

SEQ ID NO: 2784 - DNA, 31 bp, Artificial Sequence
  Description of Artificial Sequence:  Enzymatic Nucleic Acid
ctgggaagggctagctacaacgacactgaaa

SEQ ID NO: 2785 - DNA, 31 bp, Artificial Sequence
  Description of Artificial Sequence:  Enzymatic Nucleic Acid
ggtcagagggctagctacaacgatgggaagc

SEQ ID NO: 2786 - DNA, 31 bp, Artificial Sequence
  Description of Artificial Sequence:  Enzymatic Nucleic Acid
tagaagggggctagctacaacgacagagctg

SEQ ID NO: 2787 - DNA, 31 bp, Artificial Sequence
  Description of Artificial Sequence:  Enzymatic Nucleic Acid
ctcaaatgggctagctacaacgaagaagggt

SEQ ID NO: 2788 - DNA, 31 bp, Artificial Sequence
  Description of Artificial Sequence:  Enzymatic Nucleic Acid
ccctcaaaggctagctacaacgagtagaagg

SEQ ID NO: 2789 - DNA, 31 bp, Artificial Sequence
  Description of Artificial Sequence:  Enzymatic Nucleic Acid
tggctgggggctagctacaacgacctcaaat

SEQ ID NO: 2790 - DNA, 31 bp, Artificial Sequence
  Description of Artificial Sequence:  Enzymatic Nucleic Acid
gctcctggggctagctacaacgatgggccct

SEQ ID NO: 2791 - DNA, 31 bp, Artificial Sequence
  Description of Artificial Sequence:  Enzymatic Nucleic Acid
tccatctgggctagctacaacgatcctggct

SEQ ID NO: 2792 - DNA, 31 bp, Artificial Sequence
  Description of Artificial Sequence:  Enzymatic Nucleic Acid
gctgtccaggctagctacaacgactgctcct

SEQ ID NO: 2793 - DNA, 31 bp, Artificial Sequence
  Description of Artificial Sequence:  Enzymatic Nucleic Acid
catcgctgggctagctacaacgaccatctgc

SEQ ID NO: 2794 - DNA, 31 bp, Artificial Sequence
  Description of Artificial Sequence:  Enzymatic Nucleic Acid
cctcatcgggctagctacaacgatgtccatc

SEQ ID NO: 2795 - DNA, 31 bp, Artificial Sequence
  Description of Artificial Sequence:  Enzymatic Nucleic Acid
tcccctcaggctagctacaacgacgctgtcc

SEQ ID NO: 2796 - DNA, 31 bp, Artificial Sequence
  Description of Artificial Sequence:  Enzymatic Nucleic Acid
agaaaatgggctagctacaacgacccctcat

SEQ ID NO: 2797 - DNA, 31 bp, Artificial Sequence
  Description of Artificial Sequence:  Enzymatic Nucleic Acid
ccagaaaaggctagctacaacgagtcccctc

SEQ ID NO: 2798 - DNA, 31 bp, Artificial Sequence
  Description of Artificial Sequence:  Enzymatic Nucleic Acid
tcccagaaggctagctacaacgaccagaaaa

SEQ ID NO: 2799 - DNA, 31 bp, Artificial Sequence
  Description of Artificial Sequence:  Enzymatic Nucleic Acid
ttttcttgggctagctacaacgactcccaga

SEQ ID NO: 2800 - DNA, 31 bp, Artificial Sequence
  Description of Artificial Sequence:  Enzymatic Nucleic Acid
gatatttgggctagctacaacgaccttttct

SEQ ID NO: 2801 - DNA, 31 bp, Artificial Sequence
  Description of Artificial Sequence:  Enzymatic Nucleic Acid
aaaagataggctagctacaacgattgtcctt

SEQ ID NO: 2802 - DNA, 31 bp, Artificial Sequence
  Description of Artificial Sequence:  Enzymatic Nucleic Acid
aaaaaagaggctagctacaacgaatttgtcc

SEQ ID NO: 2803 - DNA, 31 bp, Artificial Sequence
  Description of Artificial Sequence:  Enzymatic Nucleic Acid
tgctttagggctagctacaacgatccaaaaa

SEQ ID NO: 2804 - DNA, 31 bp, Artificial Sequence
  Description of Artificial Sequence:  Enzymatic Nucleic Acid
aaaatttgggctagctacaacgatttagttc

SEQ ID NO: 2805 - DNA, 31 bp, Artificial Sequence
  Description of Artificial Sequence:  Enzymatic Nucleic Acid
gtctaaaaggctagctacaacgattgcttta

SEQ ID NO: 2806 - DNA, 31 bp, Artificial Sequence
  Description of Artificial Sequence:  Enzymatic Nucleic Acid
ggtaaaggggctagctacaacgactaaaatt

SEQ ID NO: 2807 - DNA, 31 bp, Artificial Sequence
  Description of Artificial Sequence:  Enzymatic Nucleic Acid
tccataggggctagctacaacgaaaaggtct

SEQ ID NO: 2808 - DNA, 31 bp, Artificial Sequence
  Description of Artificial Sequence:  Enzymatic Nucleic Acid
cacttccaggctagctacaacgaaggtaaag

SEQ ID NO: 2809 - DNA, 31 bp, Artificial Sequence
  Description of Artificial Sequence:  Enzymatic Nucleic Acid
tagaaccaggctagctacaacgattccatag

SEQ ID NO: 2810 - DNA, 31 bp, Artificial Sequence
  Description of Artificial Sequence:  Enzymatic Nucleic Acid
acatagaaggctagctacaacgacacttcca

SEQ ID NO: 2811 - DNA, 31 bp, Artificial Sequence
  Description of Artificial Sequence:  Enzymatic Nucleic Acid
aatggacaggctagctacaacgaagaaccac

SEQ ID NO: 2812 - DNA, 31 bp, Artificial Sequence
  Description of Artificial Sequence:  Enzymatic Nucleic Acid
agaatggaggctagctacaacgaatagaacc

SEQ ID NO: 2813 - DNA, 31 bp, Artificial Sequence
  Description of Artificial Sequence:  Enzymatic Nucleic Acid
aatgagaaggctagctacaacgaggacatag

SEQ ID NO: 2814 - DNA, 31 bp, Artificial Sequence
  Description of Artificial Sequence:  Enzymatic Nucleic Acid
gccacgaaggctagctacaacgagagaatgg

SEQ ID NO: 2815 - DNA, 31 bp, Artificial Sequence
  Description of Artificial Sequence:  Enzymatic Nucleic Acid
acatgccaggctagctacaacgagaatgaga

SEQ ID NO: 2816 - DNA, 31 bp, Artificial Sequence
  Description of Artificial Sequence:  Enzymatic Nucleic Acid
aaaacatgggctagctacaacgacacgaatg

SEQ ID NO: 2817 - DNA, 31 bp, Artificial Sequence
  Description of Artificial Sequence:  Enzymatic Nucleic Acid
tcaaaacaggctagctacaacgagccacgaa

SEQ ID NO: 2818 - DNA, 31 bp, Artificial Sequence
  Description of Artificial Sequence:  Enzymatic Nucleic Acid
aatcaaaaggctagctacaacgaatgccacg

SEQ ID NO: 2819 - DNA, 31 bp, Artificial Sequence
  Description of Artificial Sequence:  Enzymatic Nucleic Acid
gctacaaaggctagctacaacgacaaaacat

SEQ ID NO: 2820 - DNA, 31 bp, Artificial Sequence
  Description of Artificial Sequence:  Enzymatic Nucleic Acid
cagtgctaggctagctacaacgaaaatcaaa

SEQ ID NO: 2821 - DNA, 31 bp, Artificial Sequence
  Description of Artificial Sequence:  Enzymatic Nucleic Acid
cctcagtgggctagctacaacgatacaaatc

SEQ ID NO: 2822 - DNA, 31 bp, Artificial Sequence
  Description of Artificial Sequence:  Enzymatic Nucleic Acid
accctcagggctagctacaacgagctacaaa

SEQ ID NO: 2823 - DNA, 31 bp, Artificial Sequence
  Description of Artificial Sequence:  Enzymatic Nucleic Acid
gagtgccaggctagctacaacgacctcagtg

SEQ ID NO: 2824 - DNA, 31 bp, Artificial Sequence
  Description of Artificial Sequence:  Enzymatic Nucleic Acid
gttgagtgggctagctacaacgacaccctca

SEQ ID NO: 2825 - DNA, 31 bp, Artificial Sequence
  Description of Artificial Sequence:  Enzymatic Nucleic Acid
gagttgagggctagctacaacgagccaccct

SEQ ID NO: 2826 - DNA, 31 bp, Artificial Sequence
  Description of Artificial Sequence:  Enzymatic Nucleic Acid
gctcagagggctagctacaacgatgagtgcc

SEQ ID NO: 2827 - DNA, 31 bp, Artificial Sequence
  Description of Artificial Sequence:  Enzymatic Nucleic Acid
agtatgggggctagctacaacgatcagagtt

SEQ ID NO: 2828 - DNA, 31 bp, Artificial Sequence
  Description of Artificial Sequence:  Enzymatic Nucleic Acid
caaaagtaggctagctacaacgagggctcag

SEQ ID NO: 2829 - DNA, 31 bp, Artificial Sequence
  Description of Artificial Sequence:  Enzymatic Nucleic Acid
gccaaaagggctagctacaacgaatgggctc

SEQ ID NO: 2830 - DNA, 31 bp, Artificial Sequence
  Description of Artificial Sequence:  Enzymatic Nucleic Acid
tagaggagggctagctacaacgacaaaagta

SEQ ID NO: 2831 - DNA, 31 bp, Artificial Sequence
  Description of Artificial Sequence:  Enzymatic Nucleic Acid
gcatcttaggctagctacaacgatagaggag

SEQ ID NO: 2832 - DNA, 31 bp, Artificial Sequence
  Description of Artificial Sequence:  Enzymatic Nucleic Acid
tcagtgcaggctagctacaacgacttactag

SEQ ID NO: 2833 - DNA, 31 bp, Artificial Sequence
  Description of Artificial Sequence:  Enzymatic Nucleic Acid
tttcagtgggctagctacaacgaatcttact

SEQ ID NO: 2834 - DNA, 31 bp, Artificial Sequence
  Description of Artificial Sequence:  Enzymatic Nucleic Acid
gttttcagggctagctacaacgagcatctta

SEQ ID NO: 2835 - DNA, 31 bp, Artificial Sequence
  Description of Artificial Sequence:  Enzymatic Nucleic Acid
tggctaagggctagctacaacgatttcagtg

SEQ ID NO: 2836 - DNA, 31 bp, Artificial Sequence
  Description of Artificial Sequence:  Enzymatic Nucleic Acid
aactctggggctagctacaacgataagtttt

SEQ ID NO: 2837 - DNA, 31 bp, Artificial Sequence
  Description of Artificial Sequence:  Enzymatic Nucleic Acid
caacctaaggctagctacaacgatctggcta

SEQ ID NO: 2838 - DNA, 31 bp, Artificial Sequence
  Description of Artificial Sequence:  Enzymatic Nucleic Acid
ggagacaaggctagctacaacgactaactct

SEQ ID NO: 2839 - DNA, 31 bp, Artificial Sequence
  Description of Artificial Sequence:  Enzymatic Nucleic Acid
cctggagaggctagctacaacgaaacctaac

SEQ ID NO: 2840 - DNA, 31 bp, Artificial Sequence
  Description of Artificial Sequence:  Enzymatic Nucleic Acid
catcatggggctagctacaacgactggagac

SEQ ID NO: 2841 - DNA, 31 bp, Artificial Sequence
  Description of Artificial Sequence:  Enzymatic Nucleic Acid
ggccatcaggctagctacaacgaggcctgga

SEQ ID NO: 2842 - DNA, 31 bp, Artificial Sequence
  Description of Artificial Sequence:  Enzymatic Nucleic Acid
taaggccaggctagctacaacgacatggcct

SEQ ID NO: 2843 - DNA, 31 bp, Artificial Sequence
  Description of Artificial Sequence:  Enzymatic Nucleic Acid
gtgtaaggggctagctacaacgacatcatgg

SEQ ID NO: 2844 - DNA, 31 bp, Artificial Sequence
  Description of Artificial Sequence:  Enzymatic Nucleic Acid
tttcagtgggctagctacaacgaaaggccat

SEQ ID NO: 2845 - DNA, 31 bp, Artificial Sequence
  Description of Artificial Sequence:  Enzymatic Nucleic Acid
attttcagggctagctacaacgagtaaggcc

SEQ ID NO: 2846 - DNA, 31 bp, Artificial Sequence
  Description of Artificial Sequence:  Enzymatic Nucleic Acid
atgtgacaggctagctacaacgatttcagtg

SEQ ID NO: 2847 - DNA, 31 bp, Artificial Sequence
  Description of Artificial Sequence:  Enzymatic Nucleic Acid
gaatgtgaggctagctacaacgaattttcag

SEQ ID NO: 2848 - DNA, 31 bp, Artificial Sequence
  Description of Artificial Sequence:  Enzymatic Nucleic Acid
atagaatgggctagctacaacgagacatttt

SEQ ID NO: 2849 - DNA, 31 bp, Artificial Sequence
  Description of Artificial Sequence:  Enzymatic Nucleic Acid
aaatagaaggctagctacaacgagtgacatt

SEQ ID NO: 2850 - DNA, 31 bp, Artificial Sequence
  Description of Artificial Sequence:  Enzymatic Nucleic Acid
acccaaaaggctagctacaacgaagaatgtg

SEQ ID NO: 2851 - DNA, 31 bp, Artificial Sequence
  Description of Artificial Sequence:  Enzymatic Nucleic Acid
tattaataggctagctacaacgaccaaaata

SEQ ID NO: 2852 - DNA, 31 bp, Artificial Sequence
  Description of Artificial Sequence:  Enzymatic Nucleic Acid
tatattaaggctagctacaacgaacccaaaa

SEQ ID NO: 2853 - DNA, 31 bp, Artificial Sequence
  Description of Artificial Sequence:  Enzymatic Nucleic Acid
actatataggctagctacaacgataataccc

SEQ ID NO: 2854 - DNA, 31 bp, Artificial Sequence
  Description of Artificial Sequence:  Enzymatic Nucleic Acid
ggactataggctagctacaacgaattaatac

SEQ ID NO: 2855 - DNA, 31 bp, Artificial Sequence
  Description of Artificial Sequence:  Enzymatic Nucleic Acid
ctggactaggctagctacaacgaatattaat

SEQ ID NO: 2856 - DNA, 31 bp, Artificial Sequence
  Description of Artificial Sequence:  Enzymatic Nucleic Acid
tgtctggaggctagctacaacgatatatatt

SEQ ID NO: 2857 - DNA, 31 bp, Artificial Sequence
  Description of Artificial Sequence:  Enzymatic Nucleic Acid
gttaagtgggctagctacaacgactggacta

SEQ ID NO: 2858 - DNA, 31 bp, Artificial Sequence
  Description of Artificial Sequence:  Enzymatic Nucleic Acid
gagttaagggctagctacaacgagtctggac

SEQ ID NO: 2859 - DNA, 31 bp, Artificial Sequence
  Description of Artificial Sequence:  Enzymatic Nucleic Acid
aaattgagggctagctacaacgataagtgtc

SEQ ID NO: 2860 - DNA, 31 bp, Artificial Sequence
  Description of Artificial Sequence:  Enzymatic Nucleic Acid
ccaagaaaggctagctacaacgatgagttaa

SEQ ID NO: 2861 - DNA, 31 bp, Artificial Sequence
  Description of Artificial Sequence:  Enzymatic Nucleic Acid
gaataataggctagctacaacgacaagaaat

SEQ ID NO: 2862 - DNA, 31 bp, Artificial Sequence
  Description of Artificial Sequence:  Enzymatic Nucleic Acid
cagaataaggctagctacaacgaaccaagaa

SEQ ID NO: 2863 - DNA, 31 bp, Artificial Sequence
  Description of Artificial Sequence:  Enzymatic Nucleic Acid
aaacagaaggctagctacaacgaaataccaa

SEQ ID NO: 2864 - DNA, 31 bp, Artificial Sequence
  Description of Artificial Sequence:  Enzymatic Nucleic Acid
gtgcaaaaggctagctacaacgaagaataat

SEQ ID NO: 2865 - DNA, 31 bp, Artificial Sequence
  Description of Artificial Sequence:  Enzymatic Nucleic Acid
taactgtgggctagctacaacgaaaaacaga

SEQ ID NO: 2866 - DNA, 31 bp, Artificial Sequence
  Description of Artificial Sequence:  Enzymatic Nucleic Acid
actaactgggctagctacaacgagcaaaaca

SEQ ID NO: 2867 - DNA, 31 bp, Artificial Sequence
  Description of Artificial Sequence:  Enzymatic Nucleic Acid
acaactaaggctagctacaacgatgtgcaaa

SEQ ID NO: 2868 - DNA, 31 bp, Artificial Sequence
  Description of Artificial Sequence:  Enzymatic Nucleic Acid
tttcacaaggctagctacaacgataactgtg

SEQ ID NO: 2869 - DNA, 31 bp, Artificial Sequence
  Description of Artificial Sequence:  Enzymatic Nucleic Acid
ttctttcaggctagctacaacgaaactaact

SEQ ID NO: 2870 - DNA, 31 bp, Artificial Sequence
  Description of Artificial Sequence:  Enzymatic Nucleic Acid
cttctcagggctagctacaacgatttctttc

SEQ ID NO: 2871 - DNA, 31 bp, Artificial Sequence
  Description of Artificial Sequence:  Enzymatic Nucleic Acid
cattttcaggctagctacaacgatcttctca

SEQ ID NO: 2872 - DNA, 31 bp, Artificial Sequence
  Description of Artificial Sequence:  Enzymatic Nucleic Acid
ggactgcaggctagctacaacgatttcattc

SEQ ID NO: 2873 - DNA, 31 bp, Artificial Sequence
  Description of Artificial Sequence:  Enzymatic Nucleic Acid
caggactgggctagctacaacgaattttcat

SEQ ID NO: 2874 - DNA, 31 bp, Artificial Sequence
  Description of Artificial Sequence:  Enzymatic Nucleic Acid
cctcaggaggctagctacaacgatgcatttt

SEQ ID NO: 2875 - DNA, 31 bp, Artificial Sequence
  Description of Artificial Sequence:  Enzymatic Nucleic Acid
ggagaaaaggctagctacaacgatctcctca

SEQ ID NO: 2876 - DNA, 31 bp, Artificial Sequence
  Description of Artificial Sequence:  Enzymatic Nucleic Acid
ttttgataggctagctacaacgaggagaaaa

SEQ ID NO: 2877 - DNA, 31 bp, Artificial Sequence
  Description of Artificial Sequence:  Enzymatic Nucleic Acid
cgttttgaggctagctacaacgaatggagaa

SEQ ID NO: 2878 - DNA, 31 bp, Artificial Sequence
  Description of Artificial Sequence:  Enzymatic Nucleic Acid
agccctcgggctagctacaacgatttgatat

SEQ ID NO: 2879 - DNA, 31 bp, Artificial Sequence
  Description of Artificial Sequence:  Enzymatic Nucleic Acid
tccatcagggctagctacaacgacctcgttt

SEQ ID NO: 2880 - DNA, 31 bp, Artificial Sequence
  Description of Artificial Sequence:  Enzymatic Nucleic Acid
ttcctccaggctagctacaacgacagccctc

SEQ ID NO: 2881 - DNA, 31 bp, Artificial Sequence
  Description of Artificial Sequence:  Enzymatic Nucleic Acid
cttattgaggctagctacaacgactttttcc

SEQ ID NO: 2882 - DNA, 31 bp, Artificial Sequence
  Description of Artificial Sequence:  Enzymatic Nucleic Acid
tgaccttaggctagctacaacgatgaccttt

SEQ ID NO: 2883 - DNA, 31 bp, Artificial Sequence
  Description of Artificial Sequence:  Enzymatic Nucleic Acid
tcccttgaggctagctacaacgacttattga

SEQ ID NO: 2884 - DNA, 31 bp, Artificial Sequence
  Description of Artificial Sequence:  Enzymatic Nucleic Acid
agacggggggctagctacaacgacttccctt

SEQ ID NO: 2885 - DNA, 31 bp, Artificial Sequence
  Description of Artificial Sequence:  Enzymatic Nucleic Acid
tatagagaggctagctacaacgaggggtctt

SEQ ID NO: 2886 - DNA, 31 bp, Artificial Sequence
  Description of Artificial Sequence:  Enzymatic Nucleic Acid
ggttggtaggctagctacaacgaagagacgg

SEQ ID NO: 2887 - DNA, 31 bp, Artificial Sequence
  Description of Artificial Sequence:  Enzymatic Nucleic Acid
ttggttggggctagctacaacgaatagagac

SEQ ID NO: 2888 - DNA, 31 bp, Artificial Sequence
  Description of Artificial Sequence:  Enzymatic Nucleic Acid
tggtttggggctagctacaacgatggtatag

SEQ ID NO: 2889 - DNA, 31 bp, Artificial Sequence
  Description of Artificial Sequence:  Enzymatic Nucleic Acid
tgaattggggctagctacaacgattggttgg

SEQ ID NO: 2890 - DNA, 31 bp, Artificial Sequence
  Description of Artificial Sequence:  Enzymatic Nucleic Acid
ttggtgaaggctagctacaacgatggtttgg

SEQ ID NO: 2891 - DNA, 31 bp, Artificial Sequence
  Description of Artificial Sequence:  Enzymatic Nucleic Acid
tgtgttggggctagctacaacgagaattggt

SEQ ID NO: 2892 - DNA, 31 bp, Artificial Sequence
  Description of Artificial Sequence:  Enzymatic Nucleic Acid
caactgtgggctagctacaacgatggtgaat

SEQ ID NO: 2893 - DNA, 31 bp, Artificial Sequence
  Description of Artificial Sequence:  Enzymatic Nucleic Acid
cccaactgggctagctacaacgagttggtga

SEQ ID NO: 2894 - DNA, 31 bp, Artificial Sequence
  Description of Artificial Sequence:  Enzymatic Nucleic Acid
ggtcccaaggctagctacaacgatgtgttgg

SEQ ID NO: 2895 - DNA, 31 bp, Artificial Sequence
  Description of Artificial Sequence:  Enzymatic Nucleic Acid
gttttgggggctagctacaacgacccaactg

SEQ ID NO: 2896 - DNA, 31 bp, Artificial Sequence
  Description of Artificial Sequence:  Enzymatic Nucleic Acid
ttcctgtgggctagctacaacgatttgggtc

SEQ ID NO: 2897 - DNA, 31 bp, Artificial Sequence
  Description of Artificial Sequence:  Enzymatic Nucleic Acid
acttcctgggctagctacaacgagttttggg

SEQ ID NO: 2898 - DNA, 31 bp, Artificial Sequence
  Description of Artificial Sequence:  Enzymatic Nucleic Acid
gtgactgaggctagctacaacgattcctgtg

SEQ ID NO: 2899 - DNA, 31 bp, Artificial Sequence
  Description of Artificial Sequence:  Enzymatic Nucleic Acid
aaacgtgaggctagctacaacgatgacttcc

SEQ ID NO: 2900 - DNA, 31 bp, Artificial Sequence
  Description of Artificial Sequence:  Enzymatic Nucleic Acid
aggaaacgggctagctacaacgagactgact

SEQ ID NO: 2901 - DNA, 31 bp, Artificial Sequence
  Description of Artificial Sequence:  Enzymatic Nucleic Acid
aaaggaaaggctagctacaacgagtgactga

SEQ ID NO: 2902 - DNA, 31 bp, Artificial Sequence
  Description of Artificial Sequence:  Enzymatic Nucleic Acid
ccattaaaggctagctacaacgagaaaagga

SEQ ID NO: 2903 - DNA, 31 bp, Artificial Sequence
  Description of Artificial Sequence:  Enzymatic Nucleic Acid
aatccccaggctagctacaacgataaatgaa

SEQ ID NO: 2904 - DNA, 31 bp, Artificial Sequence
  Description of Artificial Sequence:  Enzymatic Nucleic Acid
tagtggaaggctagctacaacgaccccatta

SEQ ID NO: 2905 - DNA, 31 bp, Artificial Sequence
  Description of Artificial Sequence:  Enzymatic Nucleic Acid
tgagatagggctagctacaacgaggaatccc

SEQ ID NO: 2906 - DNA, 31 bp, Artificial Sequence
  Description of Artificial Sequence:  Enzymatic Nucleic Acid
gtgtgagaggctagctacaacgaagtggaat

SEQ ID NO: 2907 - DNA, 31 bp, Artificial Sequence
  Description of Artificial Sequence:  Enzymatic Nucleic Acid
gattagtgggctagctacaacgagagatagt

SEQ ID NO: 2908 - DNA, 31 bp, Artificial Sequence
  Description of Artificial Sequence:  Enzymatic Nucleic Acid
cagattagggctagctacaacgagtgagata

SEQ ID NO: 2909 - DNA, 31 bp, Artificial Sequence
  Description of Artificial Sequence:  Enzymatic Nucleic Acid
ctttcagaggctagctacaacgatagtgtga

SEQ ID NO: 2910 - DNA, 31 bp, Artificial Sequence
  Description of Artificial Sequence:  Enzymatic Nucleic Acid
cttccacaggctagctacaacgacctttcag

SEQ ID NO: 2911 - DNA, 31 bp, Artificial Sequence
  Description of Artificial Sequence:  Enzymatic Nucleic Acid
ctcttccaggctagctacaacgaatcctttc

SEQ ID NO: 2912 - DNA, 31 bp, Artificial Sequence
  Description of Artificial Sequence:  Enzymatic Nucleic Acid
agctaatgggctagctacaacgatcttccac

SEQ ID NO: 2913 - DNA, 31 bp, Artificial Sequence
  Description of Artificial Sequence:  Enzymatic Nucleic Acid
ccagctaaggctagctacaacgagctcttcc

SEQ ID NO: 2914 - DNA, 31 bp, Artificial Sequence
  Description of Artificial Sequence:  Enzymatic Nucleic Acid
tgcgccagggctagctacaacgataatgctc

SEQ ID NO: 2915 - DNA, 31 bp, Artificial Sequence
  Description of Artificial Sequence:  Enzymatic Nucleic Acid
aatatgcgggctagctacaacgacagctaat

SEQ ID NO: 2916 - DNA, 31 bp, Artificial Sequence
  Description of Artificial Sequence:  Enzymatic Nucleic Acid
ttaatatgggctagctacaacgagccagcta

SEQ ID NO: 2917 - DNA, 31 bp, Artificial Sequence
  Description of Artificial Sequence:  Enzymatic Nucleic Acid
gcttaataggctagctacaacgagcgccagc

SEQ ID NO: 2918 - DNA, 31 bp, Artificial Sequence
  Description of Artificial Sequence:  Enzymatic Nucleic Acid
gtgcttaaggctagctacaacgaatgcgcca

SEQ ID NO: 2919 - DNA, 31 bp, Artificial Sequence
  Description of Artificial Sequence:  Enzymatic Nucleic Acid
ttaaagtgggctagctacaacgattaatatg

SEQ ID NO: 2920 - DNA, 31 bp, Artificial Sequence
  Description of Artificial Sequence:  Enzymatic Nucleic Acid
gcttaaagggctagctacaacgagcttaata

SEQ ID NO: 2921 - DNA, 31 bp, Artificial Sequence
  Description of Artificial Sequence:  Enzymatic Nucleic Acid
tcaaggagggctagctacaacgattaaagtg

SEQ ID NO: 2922 - DNA, 31 bp, Artificial Sequence
  Description of Artificial Sequence:  Enzymatic Nucleic Acid
cctttttaggctagctacaacgatcaaggag

SEQ ID NO: 2923 - DNA, 31 bp, Artificial Sequence
  Description of Artificial Sequence:  Enzymatic Nucleic Acid
acataccaggctagctacaacgactttttac

SEQ ID NO: 2924 - DNA, 31 bp, Artificial Sequence
  Description of Artificial Sequence:  Enzymatic Nucleic Acid
attacataggctagctacaacgacacctttt

SEQ ID NO: 2925 - DNA, 31 bp, Artificial Sequence
  Description of Artificial Sequence:  Enzymatic Nucleic Acid
aaattacaggctagctacaacgaaccacctt

SEQ ID NO: 2926 - DNA, 31 bp, Artificial Sequence
  Description of Artificial Sequence:  Enzymatic Nucleic Acid
ataaattaggctagctacaacgaataccacc

SEQ ID NO: 2927 - DNA, 31 bp, Artificial Sequence
  Description of Artificial Sequence:  Enzymatic Nucleic Acid
tgcataaaggctagctacaacgatacatacc

SEQ ID NO: 2928 - DNA, 31 bp, Artificial Sequence
  Description of Artificial Sequence:  Enzymatic Nucleic Acid
accttgcaggctagctacaacgaaaattaca

SEQ ID NO: 2929 - DNA, 31 bp, Artificial Sequence
  Description of Artificial Sequence:  Enzymatic Nucleic Acid
ataccttgggctagctacaacgaataaatta

SEQ ID NO: 2930 - DNA, 31 bp, Artificial Sequence
  Description of Artificial Sequence:  Enzymatic Nucleic Acid
gagaaataggctagctacaacgacttgcata

SEQ ID NO: 2931 - DNA, 31 bp, Artificial Sequence
  Description of Artificial Sequence:  Enzymatic Nucleic Acid
tggagaaaggctagctacaacgaaccttgca

SEQ ID NO: 2932 - DNA, 31 bp, Artificial Sequence
  Description of Artificial Sequence:  Enzymatic Nucleic Acid
agtcccaaggctagctacaacgatggagaaa

SEQ ID NO: 2933 - DNA, 31 bp, Artificial Sequence
  Description of Artificial Sequence:  Enzymatic Nucleic Acid
atcctgagggctagctacaacgacccaactg

SEQ ID NO: 2934 - DNA, 31 bp, Artificial Sequence
  Description of Artificial Sequence:  Enzymatic Nucleic Acid
aactaataggctagctacaacgacctgagtc

SEQ ID NO: 2935 - DNA, 31 bp, Artificial Sequence
  Description of Artificial Sequence:  Enzymatic Nucleic Acid
ttaactaaggctagctacaacgaatcctgag

SEQ ID NO: 2936 - DNA, 31 bp, Artificial Sequence
  Description of Artificial Sequence:  Enzymatic Nucleic Acid
ctcattaaggctagctacaacgataatatcc

SEQ ID NO: 2937 - DNA, 31 bp, Artificial Sequence
  Description of Artificial Sequence:  Enzymatic Nucleic Acid
atggctcaggctagctacaacgataactaat

SEQ ID NO: 2938 - DNA, 31 bp, Artificial Sequence
  Description of Artificial Sequence:  Enzymatic Nucleic Acid
agtgatggggctagctacaacgatcattaac

SEQ ID NO: 2939 - DNA, 31 bp, Artificial Sequence
  Description of Artificial Sequence:  Enzymatic Nucleic Acid
tctagtgaggctagctacaacgaggctcatt

SEQ ID NO: 2940 - DNA, 31 bp, Artificial Sequence
  Description of Artificial Sequence:  Enzymatic Nucleic Acid
tcttctagggctagctacaacgagatggctc

SEQ ID NO: 2941 - DNA, 31 bp, Artificial Sequence
  Description of Artificial Sequence:  Enzymatic Nucleic Acid
aaaatgggggctagctacaacgattttcttc

SEQ ID NO: 2942 - DNA, 31 bp, Artificial Sequence
  Description of Artificial Sequence:  Enzymatic Nucleic Acid
gttgaaaaggctagctacaacgagggctttt

SEQ ID NO: 2943 - DNA, 31 bp, Artificial Sequence
  Description of Artificial Sequence:  Enzymatic Nucleic Acid
caaagcagggctagctacaacgatgaaaatg

SEQ ID NO: 2944 - DNA, 31 bp, Artificial Sequence
  Description of Artificial Sequence:  Enzymatic Nucleic Acid
tttcaaagggctagctacaacgaagttgaaa

SEQ ID NO: 2945 - DNA, 31 bp, Artificial Sequence
  Description of Artificial Sequence:  Enzymatic Nucleic Acid
caggcaagggctagctacaacgattcaaagc

SEQ ID NO: 2946 - DNA, 31 bp, Artificial Sequence
  Description of Artificial Sequence:  Enzymatic Nucleic Acid
accccaggggctagctacaacgaaagtttca

SEQ ID NO: 2947 - DNA, 31 bp, Artificial Sequence
  Description of Artificial Sequence:  Enzymatic Nucleic Acid
tgctcagaggctagctacaacgacccaggca

SEQ ID NO: 2948 - DNA, 31 bp, Artificial Sequence
  Description of Artificial Sequence:  Enzymatic Nucleic Acid
ccatcatgggctagctacaacgatcagaccc

SEQ ID NO: 2949 - DNA, 31 bp, Artificial Sequence
  Description of Artificial Sequence:  Enzymatic Nucleic Acid
tcccatcaggctagctacaacgagctcagac

SEQ ID NO: 2950 - DNA, 31 bp, Artificial Sequence
  Description of Artificial Sequence:  Enzymatic Nucleic Acid
tattcccaggctagctacaacgacatgctca

SEQ ID NO: 2951 - DNA, 31 bp, Artificial Sequence
  Description of Artificial Sequence:  Enzymatic Nucleic Acid
tctccctaggctagctacaacgatcccatca

SEQ ID NO: 2952 - DNA, 31 bp, Artificial Sequence
  Description of Artificial Sequence:  Enzymatic Nucleic Acid
ctaccctgggctagctacaacgactccctat

SEQ ID NO: 2953 - DNA, 31 bp, Artificial Sequence
  Description of Artificial Sequence:  Enzymatic Nucleic Acid
ctttcctaggctagctacaacgacctgtctc

SEQ ID NO: 2954 - DNA, 31 bp, Artificial Sequence
  Description of Artificial Sequence:  Enzymatic Nucleic Acid
agtaggcgggctagctacaacgacctttcct

SEQ ID NO: 2955 - DNA, 31 bp, Artificial Sequence
  Description of Artificial Sequence:  Enzymatic Nucleic Acid
agagtaggggctagctacaacgagccctttc

SEQ ID NO: 2956 - DNA, 31 bp, Artificial Sequence
  Description of Artificial Sequence:  Enzymatic Nucleic Acid
ctgaagagggctagctacaacgaaggcgccc

SEQ ID NO: 2957 - DNA, 31 bp, Artificial Sequence
  Description of Artificial Sequence:  Enzymatic Nucleic Acid
tctttagaggctagctacaacgacctgaaga

SEQ ID NO: 2958 - DNA, 31 bp, Artificial Sequence
  Description of Artificial Sequence:  Enzymatic Nucleic Acid
ccacttgaggctagctacaacgactttagac

SEQ ID NO: 2959 - DNA, 31 bp, Artificial Sequence
  Description of Artificial Sequence:  Enzymatic Nucleic Acid
aaggcccaggctagctacaacgattgatctt

SEQ ID NO: 2960 - DNA, 31 bp, Artificial Sequence
  Description of Artificial Sequence:  Enzymatic Nucleic Acid
atccaaggggctagctacaacgaccacttga

SEQ ID NO: 2961 - DNA, 31 bp, Artificial Sequence
  Description of Artificial Sequence:  Enzymatic Nucleic Acid
cttagcgaggctagctacaacgaccaaggcc

SEQ ID NO: 2962 - DNA, 31 bp, Artificial Sequence
  Description of Artificial Sequence:  Enzymatic Nucleic Acid
cagcttagggctagctacaacgagatccaag

SEQ ID NO: 2963 - DNA, 31 bp, Artificial Sequence
  Description of Artificial Sequence:  Enzymatic Nucleic Acid
agagccagggctagctacaacgattagcgat

SEQ ID NO: 2964 - DNA, 31 bp, Artificial Sequence
  Description of Artificial Sequence:  Enzymatic Nucleic Acid
aaacagagggctagctacaacgacagcttag

SEQ ID NO: 2965 - DNA, 31 bp, Artificial Sequence
  Description of Artificial Sequence:  Enzymatic Nucleic Acid
gcatcaaaggctagctacaacgaagagccag

SEQ ID NO: 2966 - DNA, 31 bp, Artificial Sequence
  Description of Artificial Sequence:  Enzymatic Nucleic Acid
aaatagcaggctagctacaacgacaaacaga

SEQ ID NO: 2967 - DNA, 31 bp, Artificial Sequence
  Description of Artificial Sequence:  Enzymatic Nucleic Acid
ataaatagggctagctacaacgaatcaaaca

SEQ ID NO: 2968 - DNA, 31 bp, Artificial Sequence
  Description of Artificial Sequence:  Enzymatic Nucleic Acid
tgcataaaggctagctacaacgaagcatcaa

SEQ ID NO: 2969 - DNA, 31 bp, Artificial Sequence
  Description of Artificial Sequence:  Enzymatic Nucleic Acid
aacttgcaggctagctacaacgaaaatagca

SEQ ID NO: 2970 - DNA, 31 bp, Artificial Sequence
  Description of Artificial Sequence:  Enzymatic Nucleic Acid
ctaacttgggctagctacaacgaataaatag

SEQ ID NO: 2971 - DNA, 31 bp, Artificial Sequence
  Description of Artificial Sequence:  Enzymatic Nucleic Acid
gaccctaaggctagctacaacgattgcataa

SEQ ID NO: 2972 - DNA, 31 bp, Artificial Sequence
  Description of Artificial Sequence:  Enzymatic Nucleic Acid
tacatagaggctagctacaacgacctaactt

SEQ ID NO: 2973 - DNA, 31 bp, Artificial Sequence
  Description of Artificial Sequence:  Enzymatic Nucleic Acid
taaatacaggctagctacaacgaagacccta

SEQ ID NO: 2974 - DNA, 31 bp, Artificial Sequence
  Description of Artificial Sequence:  Enzymatic Nucleic Acid
cctaaataggctagctacaacgaatagaccc

SEQ ID NO: 2975 - DNA, 31 bp, Artificial Sequence
  Description of Artificial Sequence:  Enzymatic Nucleic Acid
atcctaaaggctagctacaacgaacatagac

SEQ ID NO: 2976 - DNA, 31 bp, Artificial Sequence
  Description of Artificial Sequence:  Enzymatic Nucleic Acid
taggcgcaggctagctacaacgacctaaata

SEQ ID NO: 2977 - DNA, 31 bp, Artificial Sequence
  Description of Artificial Sequence:  Enzymatic Nucleic Acid
agtaggcgggctagctacaacgaatcctaaa

SEQ ID NO: 2978 - DNA, 31 bp, Artificial Sequence
  Description of Artificial Sequence:  Enzymatic Nucleic Acid
agagtaggggctagctacaacgagcatccta

SEQ ID NO: 2979 - DNA, 31 bp, Artificial Sequence
  Description of Artificial Sequence:  Enzymatic Nucleic Acid
ctgaagagggctagctacaacgaaggcgcat

SEQ ID NO: 2980 - DNA, 31 bp, Artificial Sequence; identical to SEQ ID NO: 2957
  Description of Artificial Sequence:  Enzymatic Nucleic Acid

SEQ ID NO: 2981 - DNA, 31 bp, Artificial Sequence; identical to SEQ ID NO: 2958
  Description of Artificial Sequence:  Enzymatic Nucleic Acid

SEQ ID NO: 2982 - DNA, 31 bp, Artificial Sequence; identical to SEQ ID NO: 2959
  Description of Artificial Sequence:  Enzymatic Nucleic Acid

SEQ ID NO: 2983 - DNA, 31 bp, Artificial Sequence; identical to SEQ ID NO: 2960
  Description of Artificial Sequence:  Enzymatic Nucleic Acid

SEQ ID NO: 2984 - DNA, 31 bp, Artificial Sequence; identical to SEQ ID NO: 2961
  Description of Artificial Sequence:  Enzymatic Nucleic Acid

SEQ ID NO: 2985 - DNA, 31 bp, Artificial Sequence; identical to SEQ ID NO: 2962
  Description of Artificial Sequence:  Enzymatic Nucleic Acid

SEQ ID NO: 2986 - DNA, 31 bp, Artificial Sequence; identical to SEQ ID NO: 2963
  Description of Artificial Sequence:  Enzymatic Nucleic Acid

SEQ ID NO: 2987 - DNA, 31 bp, Artificial Sequence; identical to SEQ ID NO: 2964
  Description of Artificial Sequence:  Enzymatic Nucleic Acid

SEQ ID NO: 2988 - DNA, 31 bp, Artificial Sequence; identical to SEQ ID NO: 2965
  Description of Artificial Sequence:  Enzymatic Nucleic Acid

SEQ ID NO: 2989 - DNA, 31 bp, Artificial Sequence; identical to SEQ ID NO: 2966
  Description of Artificial Sequence:  Enzymatic Nucleic Acid

SEQ ID NO: 2990 - DNA, 31 bp, Artificial Sequence; identical to SEQ ID NO: 2967
  Description of Artificial Sequence:  Enzymatic Nucleic Acid

SEQ ID NO: 2991 - DNA, 31 bp, Artificial Sequence; identical to SEQ ID NO: 2968
  Description of Artificial Sequence:  Enzymatic Nucleic Acid

SEQ ID NO: 2992 - DNA, 31 bp, Artificial Sequence; identical to SEQ ID NO: 2969
  Description of Artificial Sequence:  Enzymatic Nucleic Acid

SEQ ID NO: 2993 - DNA, 31 bp, Artificial Sequence; identical to SEQ ID NO: 2970
  Description of Artificial Sequence:  Enzymatic Nucleic Acid

SEQ ID NO: 2994 - DNA, 31 bp, Artificial Sequence; identical to SEQ ID NO: 2971
  Description of Artificial Sequence:  Enzymatic Nucleic Acid

SEQ ID NO: 2995 - DNA, 31 bp, Artificial Sequence; identical to SEQ ID NO: 2972
  Description of Artificial Sequence:  Enzymatic Nucleic Acid

SEQ ID NO: 2996 - DNA, 31 bp, Artificial Sequence; identical to SEQ ID NO: 2973
  Description of Artificial Sequence:  Enzymatic Nucleic Acid

SEQ ID NO: 2997 - DNA, 31 bp, Artificial Sequence; identical to SEQ ID NO: 2974
  Description of Artificial Sequence:  Enzymatic Nucleic Acid

SEQ ID NO: 2998 - DNA, 31 bp, Artificial Sequence; identical to SEQ ID NO: 2975
  Description of Artificial Sequence:  Enzymatic Nucleic Acid

SEQ ID NO: 2999 - DNA, 31 bp, Artificial Sequence
  Description of Artificial Sequence:  Enzymatic Nucleic Acid
tgcagacaggctagctacaacgacctaaata

SEQ ID NO: 3000 - DNA, 31 bp, Artificial Sequence
  Description of Artificial Sequence:  Enzymatic Nucleic Acid
ggtgcagaggctagctacaacgaatcctaaa

SEQ ID NO: 3001 - DNA, 31 bp, Artificial Sequence
  Description of Artificial Sequence:  Enzymatic Nucleic Acid
agaaggtgggctagctacaacgaagacatcc

SEQ ID NO: 3002 - DNA, 31 bp, Artificial Sequence
  Description of Artificial Sequence:  Enzymatic Nucleic Acid
gcagaaggggctagctacaacgagcagacat

SEQ ID NO: 3003 - DNA, 31 bp, Artificial Sequence
  Description of Artificial Sequence:  Enzymatic Nucleic Acid
actggctgggctagctacaacgaagaaggtg

SEQ ID NO: 3004 - DNA, 31 bp, Artificial Sequence
  Description of Artificial Sequence:  Enzymatic Nucleic Acid
ctgactggggctagctacaacgatgcagaag

SEQ ID NO: 3005 - DNA, 31 bp, Artificial Sequence
  Description of Artificial Sequence:  Enzymatic Nucleic Acid
gcttctgaggctagctacaacgatggctgca

SEQ ID NO: 3006 - DNA, 31 bp, Artificial Sequence
  Description of Artificial Sequence:  Enzymatic Nucleic Acid
ctctccagggctagctacaacgattctgact

SEQ ID NO: 3007 - DNA, 31 bp, Artificial Sequence
  Description of Artificial Sequence:  Enzymatic Nucleic Acid
cactgttgggctagctacaacgactctccag

SEQ ID NO: 3008 - DNA, 31 bp, Artificial Sequence
  Description of Artificial Sequence:  Enzymatic Nucleic Acid
atccactgggctagctacaacgatgcctctc

SEQ ID NO: 3009 - DNA, 31 bp, Artificial Sequence
  Description of Artificial Sequence:  Enzymatic Nucleic Acid
gcaatccaggctagctacaacgatgttgcct

SEQ ID NO: 3010 - DNA, 31 bp, Artificial Sequence
  Description of Artificial Sequence:  Enzymatic Nucleic Acid
agcagcaaggctagctacaacgaccactgtt

SEQ ID NO: 3011 - DNA, 31 bp, Artificial Sequence
  Description of Artificial Sequence:  Enzymatic Nucleic Acid
agaagcagggctagctacaacgaaatccact

SEQ ID NO: 3012 - DNA, 31 bp, Artificial Sequence
  Description of Artificial Sequence:  Enzymatic Nucleic Acid
ccaagaagggctagctacaacgaagcaatcc

SEQ ID NO: 3013 - DNA, 31 bp, Artificial Sequence
  Description of Artificial Sequence:  Enzymatic Nucleic Acid
gaagcataggctagctacaacgatcttctcc

SEQ ID NO: 3014 - DNA, 31 bp, Artificial Sequence
  Description of Artificial Sequence:  Enzymatic Nucleic Acid
aggaagcaggctagctacaacgaactcttct

SEQ ID NO: 3015 - DNA, 31 bp, Artificial Sequence
  Description of Artificial Sequence:  Enzymatic Nucleic Acid
aaaggaagggctagctacaacgaatactctt

SEQ ID NO: 3016 - DNA, 31 bp, Artificial Sequence
  Description of Artificial Sequence:  Enzymatic Nucleic Acid
tacatggaggctagctacaacgaaaaaggaa

SEQ ID NO: 3017 - DNA, 31 bp, Artificial Sequence
  Description of Artificial Sequence:  Enzymatic Nucleic Acid
aaattacaggctagctacaacgaggataaaa

SEQ ID NO: 3018 - DNA, 31 bp, Artificial Sequence
  Description of Artificial Sequence:  Enzymatic Nucleic Acid
ttaaattaggctagctacaacgaatggataa

SEQ ID NO: 3019 - DNA, 31 bp, Artificial Sequence
  Description of Artificial Sequence:  Enzymatic Nucleic Acid
cagttaaaggctagctacaacgatacatgga

SEQ ID NO: 3020 - DNA, 31 bp, Artificial Sequence
  Description of Artificial Sequence:  Enzymatic Nucleic Acid
ttctacagggctagctacaacgataaattac

SEQ ID NO: 3021 - DNA, 31 bp, Artificial Sequence
  Description of Artificial Sequence:  Enzymatic Nucleic Acid
aggttctaggctagctacaacgaagttaaat

SEQ ID NO: 3022 - DNA, 31 bp, Artificial Sequence
  Description of Artificial Sequence:  Enzymatic Nucleic Acid
agctcaggggctagctacaacgatctacagt

SEQ ID NO: 3023 - DNA, 31 bp, Artificial Sequence
  Description of Artificial Sequence:  Enzymatic Nucleic Acid
acttagagggctagctacaacgatcaggttc

SEQ ID NO: 3024 - DNA, 31 bp, Artificial Sequence
  Description of Artificial Sequence:  Enzymatic Nucleic Acid
ttcggttaggctagctacaacgattagagct

SEQ ID NO: 3025 - DNA, 31 bp, Artificial Sequence
  Description of Artificial Sequence:  Enzymatic Nucleic Acid
ttcttcggggctagctacaacgatacttaga

SEQ ID NO: 3026 - DNA, 31 bp, Artificial Sequence
  Description of Artificial Sequence:  Enzymatic Nucleic Acid
ggcatacaggctagctacaacgatcttcggt

SEQ ID NO: 3027 - DNA, 31 bp, Artificial Sequence
  Description of Artificial Sequence:  Enzymatic Nucleic Acid
gaggcataggctagctacaacgaattcttcg

SEQ ID NO: 3028 - DNA, 31 bp, Artificial Sequence
  Description of Artificial Sequence:  Enzymatic Nucleic Acid
cagaggcaggctagctacaacgaacattctt

SEQ ID NO: 3029 - DNA, 31 bp, Artificial Sequence
  Description of Artificial Sequence:  Enzymatic Nucleic Acid
aacagaggggctagctacaacgaatacattc

SEQ ID NO: 3030 - DNA, 31 bp, Artificial Sequence
  Description of Artificial Sequence:  Enzymatic Nucleic Acid
cataagaaggctagctacaacgaagaggcat

SEQ ID NO: 3031 - DNA, 31 bp, Artificial Sequence
  Description of Artificial Sequence:  Enzymatic Nucleic Acid
gtggcacaggctagctacaacgaaagaacag

SEQ ID NO: 3032 - DNA, 31 bp, Artificial Sequence
  Description of Artificial Sequence:  Enzymatic Nucleic Acid
atgtggcaggctagctacaacgaataagaac

SEQ ID NO: 3033 - DNA, 31 bp, Artificial Sequence
  Description of Artificial Sequence:  Enzymatic Nucleic Acid
ggatgtggggctagctacaacgaacataaga

SEQ ID NO: 3034 - DNA, 31 bp, Artificial Sequence
  Description of Artificial Sequence:  Enzymatic Nucleic Acid
caaggatgggctagctacaacgaggcacata

SEQ ID NO: 3035 - DNA, 31 bp, Artificial Sequence
  Description of Artificial Sequence:  Enzymatic Nucleic Acid
aacaaggaggctagctacaacgagtggcaca

SEQ ID NO: 3036 - DNA, 31 bp, Artificial Sequence
  Description of Artificial Sequence:  Enzymatic Nucleic Acid
cctttaaaggctagctacaacgaaaggatgt

SEQ ID NO: 3037 - DNA, 31 bp, Artificial Sequence
  Description of Artificial Sequence:  Enzymatic Nucleic Acid
acagagagggctagctacaacgactttaaac

SEQ ID NO: 3038 - DNA, 31 bp, Artificial Sequence
  Description of Artificial Sequence:  Enzymatic Nucleic Acid
tcttcataggctagctacaacgaagagagcc

SEQ ID NO: 3039 - DNA, 31 bp, Artificial Sequence
  Description of Artificial Sequence:  Enzymatic Nucleic Acid
tctcttcaggctagctacaacgaacagagag

SEQ ID NO: 3040 - DNA, 31 bp, Artificial Sequence
  Description of Artificial Sequence:  Enzymatic Nucleic Acid
cggtcccaggctagctacaacgactcttcat

SEQ ID NO: 3041 - DNA, 31 bp, Artificial Sequence
  Description of Artificial Sequence:  Enzymatic Nucleic Acid
gatgacggggctagctacaacgacccatctc

SEQ ID NO: 3042 - DNA, 31 bp, Artificial Sequence
  Description of Artificial Sequence:  Enzymatic Nucleic Acid
gctgatgaggctagctacaacgaggtcccat

SEQ ID NO: 3043 - DNA, 31 bp, Artificial Sequence
  Description of Artificial Sequence:  Enzymatic Nucleic Acid
tgtgctgaggctagctacaacgagacggtcc

SEQ ID NO: 3044 - DNA, 31 bp, Artificial Sequence
  Description of Artificial Sequence:  Enzymatic Nucleic Acid
ggaatgtgggctagctacaacgatgatgacg

SEQ ID NO: 3045 - DNA, 31 bp, Artificial Sequence
  Description of Artificial Sequence:  Enzymatic Nucleic Acid
agggaatgggctagctacaacgagctgatga

SEQ ID NO: 3046 - DNA, 31 bp, Artificial Sequence
  Description of Artificial Sequence:  Enzymatic Nucleic Acid
ctagggaaggctagctacaacgagtgctgat

SEQ ID NO: 3047 - DNA, 31 bp, Artificial Sequence
  Description of Artificial Sequence:  Enzymatic Nucleic Acid
taggctcaggctagctacaacgatagggaat

SEQ ID NO: 3048 - DNA, 31 bp, Artificial Sequence
  Description of Artificial Sequence:  Enzymatic Nucleic Acid
ccagtaggggctagctacaacgatcactagg

SEQ ID NO: 3049 - DNA, 31 bp, Artificial Sequence
  Description of Artificial Sequence:  Enzymatic Nucleic Acid
ggagccagggctagctacaacgaaggctcac

SEQ ID NO: 3050 - DNA, 31 bp, Artificial Sequence
  Description of Artificial Sequence:  Enzymatic Nucleic Acid
gccaggagggctagctacaacgacagtaggc

SEQ ID NO: 3051 - DNA, 31 bp, Artificial Sequence
  Description of Artificial Sequence:  Enzymatic Nucleic Acid
agccgctgggctagctacaacgacaggagcc

SEQ ID NO: 3052 - DNA, 31 bp, Artificial Sequence
  Description of Artificial Sequence:  Enzymatic Nucleic Acid
aaaagccgggctagctacaacgatgccagga

SEQ ID NO: 3053 - DNA, 31 bp, Artificial Sequence
  Description of Artificial Sequence:  Enzymatic Nucleic Acid
cacaaaagggctagctacaacgacgctgcca

SEQ ID NO: 3054 - DNA, 31 bp, Artificial Sequence
  Description of Artificial Sequence:  Enzymatic Nucleic Acid
gtcttccaggctagctacaacgaaaaagccg

SEQ ID NO: 3055 - DNA, 31 bp, Artificial Sequence
  Description of Artificial Sequence:  Enzymatic Nucleic Acid
ctagtgagggctagctacaacgacttccaca

SEQ ID NO: 3056 - DNA, 31 bp, Artificial Sequence
  Description of Artificial Sequence:  Enzymatic Nucleic Acid
ctggctagggctagctacaacgagagtcttc

SEQ ID NO: 3057 - DNA, 31 bp, Artificial Sequence
  Description of Artificial Sequence:  Enzymatic Nucleic Acid
tcttctggggctagctacaacgatagtgagt

SEQ ID NO: 3058 - DNA, 31 bp, Artificial Sequence
  Description of Artificial Sequence:  Enzymatic Nucleic Acid
ctgtcccaggctagctacaacgatcctctct

SEQ ID NO: 3059 - DNA, 31 bp, Artificial Sequence
  Description of Artificial Sequence:  Enzymatic Nucleic Acid
gaggactgggctagctacaacgacccactcc

SEQ ID NO: 3060 - DNA, 31 bp, Artificial Sequence
  Description of Artificial Sequence:  Enzymatic Nucleic Acid
ggagaggaggctagctacaacgatgtcccac

SEQ ID NO: 3061 - DNA, 31 bp, Artificial Sequence
  Description of Artificial Sequence:  Enzymatic Nucleic Acid
gatcttggggctagctacaacgaggagagga

SEQ ID NO: 3062 - DNA, 31 bp, Artificial Sequence
  Description of Artificial Sequence:  Enzymatic Nucleic Acid
gatttagaggctagctacaacgacttggtgg

SEQ ID NO: 3063 - DNA, 31 bp, Artificial Sequence
  Description of Artificial Sequence:  Enzymatic Nucleic Acid
tgtttggaggctagctacaacgattagatct

SEQ ID NO: 3064 - DNA, 31 bp, Artificial Sequence
  Description of Artificial Sequence:  Enzymatic Nucleic Acid
tgcttttgggctagctacaacgattggattt

SEQ ID NO: 3065 - DNA, 31 bp, Artificial Sequence
  Description of Artificial Sequence:  Enzymatic Nucleic Acid
ctagcctgggctagctacaacgattttgttt

SEQ ID NO: 3066 - DNA, 31 bp, Artificial Sequence
  Description of Artificial Sequence:  Enzymatic Nucleic Acid
ggctctagggctagctacaacgactgctttt

SEQ ID NO: 3067 - DNA, 31 bp, Artificial Sequence
  Description of Artificial Sequence:  Enzymatic Nucleic Acid
tcttctggggctagctacaacgatctagcct

SEQ ID NO: 3068 - DNA, 31 bp, Artificial Sequence
  Description of Artificial Sequence:  Enzymatic Nucleic Acid
aagatttgggctagctacaacgacctctctt

SEQ ID NO: 3069 - DNA, 31 bp, Artificial Sequence
  Description of Artificial Sequence:  Enzymatic Nucleic Acid
aacaaagaggctagctacaacgattgtcctc

SEQ ID NO: 3070 - DNA, 31 bp, Artificial Sequence
  Description of Artificial Sequence:  Enzymatic Nucleic Acid
aggaacaaggctagctacaacgaaaagattt

SEQ ID NO: 3071 - DNA, 31 bp, Artificial Sequence
  Description of Artificial Sequence:  Enzymatic Nucleic Acid
aagaggaaggctagctacaacgaaacaaaga

SEQ ID NO: 3072 - DNA, 31 bp, Artificial Sequence
  Description of Artificial Sequence:  Enzymatic Nucleic Acid
cgtatgtgggctagctacaacgaaaagaaga

SEQ ID NO: 3073 - DNA, 31 bp, Artificial Sequence
  Description of Artificial Sequence:  Enzymatic Nucleic Acid
tgcgtatgggctagctacaacgagtaaagaa

SEQ ID NO: 3074 - DNA, 31 bp, Artificial Sequence
  Description of Artificial Sequence:  Enzymatic Nucleic Acid
tttgcgtaggctagctacaacgagtgtaaag

SEQ ID NO: 3075 - DNA, 31 bp, Artificial Sequence
  Description of Artificial Sequence:  Enzymatic Nucleic Acid
ggtttgcgggctagctacaacgaatgtgtaa

SEQ ID NO: 3076 - DNA, 31 bp, Artificial Sequence
  Description of Artificial Sequence:  Enzymatic Nucleic Acid
gtggtttgggctagctacaacgagtatgtgt

SEQ ID NO: 3077 - DNA, 31 bp, Artificial Sequence
  Description of Artificial Sequence:  Enzymatic Nucleic Acid
acaggtggggctagctacaacgattgcgtat

SEQ ID NO: 3078 - DNA, 31 bp, Artificial Sequence
  Description of Artificial Sequence:  Enzymatic Nucleic Acid
gtcacaggggctagctacaacgaggtttgcg

SEQ ID NO: 3079 - DNA, 31 bp, Artificial Sequence
  Description of Artificial Sequence:  Enzymatic Nucleic Acid
agctgtcaggctagctacaacgaaggtggtt

SEQ ID NO: 3080 - DNA, 31 bp, Artificial Sequence
  Description of Artificial Sequence:  Enzymatic Nucleic Acid
gccagctgggctagctacaacgacacaggtg

SEQ ID NO: 3081 - DNA, 31 bp, Artificial Sequence
  Description of Artificial Sequence:  Enzymatic Nucleic Acid
attgccagggctagctacaacgatgtcacag

SEQ ID NO: 3082 - DNA, 31 bp, Artificial Sequence
  Description of Artificial Sequence:  Enzymatic Nucleic Acid
taaaattgggctagctacaacgacagctgtc

SEQ ID NO: 3083 - DNA, 31 bp, Artificial Sequence
  Description of Artificial Sequence:  Enzymatic Nucleic Acid
ttataaaaggctagctacaacgatgccagct

SEQ ID NO: 3084 - DNA, 31 bp, Artificial Sequence
  Description of Artificial Sequence:  Enzymatic Nucleic Acid
ctgatttaggctagctacaacgaaaaattgc

SEQ ID NO: 3085 - DNA, 31 bp, Artificial Sequence
  Description of Artificial Sequence:  Enzymatic Nucleic Acid
ttacctgaggctagctacaacgattataaaa

SEQ ID NO: 3086 - DNA, 31 bp, Artificial Sequence
  Description of Artificial Sequence:  Enzymatic Nucleic Acid
tccagttaggctagctacaacgactgattta

SEQ ID NO: 3087 - DNA, 31 bp, Artificial Sequence
  Description of Artificial Sequence:  Enzymatic Nucleic Acid
ccttccagggctagctacaacgatacctgat

SEQ ID NO: 3088 - DNA, 31 bp, Artificial Sequence
  Description of Artificial Sequence:  Enzymatic Nucleic Acid
gagtttaaggctagctacaacgactccttcc

SEQ ID NO: 3089 - DNA, 31 bp, Artificial Sequence
  Description of Artificial Sequence:  Enzymatic Nucleic Acid
tttctgagggctagctacaacgattaacctc

SEQ ID NO: 3090 - DNA, 31 bp, Artificial Sequence
  Description of Artificial Sequence:  Enzymatic Nucleic Acid
gactgaggggctagctacaacgacttctttt

SEQ ID NO: 3091 - DNA, 31 bp, Artificial Sequence
  Description of Artificial Sequence:  Enzymatic Nucleic Acid
agaattgaggctagctacaacgatgaggtct

SEQ ID NO: 3092 - DNA, 31 bp, Artificial Sequence
  Description of Artificial Sequence:  Enzymatic Nucleic Acid
gtagagaaggctagctacaacgatgactgag

SEQ ID NO: 3093 - DNA, 31 bp, Artificial Sequence
  Description of Artificial Sequence:  Enzymatic Nucleic Acid
aaaaaaagggctagctacaacgaagagaatt

SEQ ID NO: 3094 - DNA, 31 bp, Artificial Sequence
  Description of Artificial Sequence:  Enzymatic Nucleic Acid
ttatctgaggctagctacaacgattggaaaa

SEQ ID NO: 3095 - DNA, 31 bp, Artificial Sequence
  Description of Artificial Sequence:  Enzymatic Nucleic Acid
ggctattaggctagctacaacgactgatttg

SEQ ID NO: 3096 - DNA, 31 bp, Artificial Sequence
  Description of Artificial Sequence:  Enzymatic Nucleic Acid
ctgggctaggctagctacaacgatatctgat

SEQ ID NO: 3097 - DNA, 31 bp, Artificial Sequence
  Description of Artificial Sequence:  Enzymatic Nucleic Acid
ttgctgggggctagctacaacgatattatct

SEQ ID NO: 3098 - DNA, 31 bp, Artificial Sequence
  Description of Artificial Sequence:  Enzymatic Nucleic Acid
actatttgggctagctacaacgatgggctat

SEQ ID NO: 3099 - DNA, 31 bp, Artificial Sequence
  Description of Artificial Sequence:  Enzymatic Nucleic Acid
tatcactaggctagctacaacgattgctggg

SEQ ID NO: 3100 - DNA, 31 bp, Artificial Sequence
  Description of Artificial Sequence:  Enzymatic Nucleic Acid
tgttatcaggctagctacaacgatatttgct

SEQ ID NO: 3101 - DNA, 31 bp, Artificial Sequence
  Description of Artificial Sequence:  Enzymatic Nucleic Acid
atttgttaggctagctacaacgacactattt

SEQ ID NO: 3102 - DNA, 31 bp, Artificial Sequence
  Description of Artificial Sequence:  Enzymatic Nucleic Acid
tttatttgggctagctacaacgatatcacta

SEQ ID NO: 3103 - DNA, 31 bp, Artificial Sequence
  Description of Artificial Sequence:  Enzymatic Nucleic Acid
aggttttaggctagctacaacgattgttatc

SEQ ID NO: 3104 - DNA, 31 bp, Artificial Sequence
  Description of Artificial Sequence:  Enzymatic Nucleic Acid
agctaaggggctagctacaacgatttatttg

SEQ ID NO: 3105 - DNA, 31 bp, Artificial Sequence
  Description of Artificial Sequence:  Enzymatic Nucleic Acid
atgaacagggctagctacaacgataaggttt

SEQ ID NO: 3106 - DNA, 31 bp, Artificial Sequence
  Description of Artificial Sequence:  Enzymatic Nucleic Acid
gacatgaaggctagctacaacgaagctaagg

SEQ ID NO: 3107 - DNA, 31 bp, Artificial Sequence
  Description of Artificial Sequence:  Enzymatic Nucleic Acid
tcaagacaggctagctacaacgagaacagct

SEQ ID NO: 3108 - DNA, 31 bp, Artificial Sequence
  Description of Artificial Sequence:  Enzymatic Nucleic Acid
aatcaagaggctagctacaacgaatgaacag

SEQ ID NO: 3109 - DNA, 31 bp, Artificial Sequence
  Description of Artificial Sequence:  Enzymatic Nucleic Acid
tattgaaaggctagctacaacgacaagacat

SEQ ID NO: 3110 - DNA, 31 bp, Artificial Sequence
  Description of Artificial Sequence:  Enzymatic Nucleic Acid
attaattaggctagctacaacgatgaaatca

SEQ ID NO: 3111 - DNA, 31 bp, Artificial Sequence
  Description of Artificial Sequence:  Enzymatic Nucleic Acid
agaattaaggctagctacaacgatattgaaa

SEQ ID NO: 3112 - DNA, 31 bp, Artificial Sequence
  Description of Artificial Sequence:  Enzymatic Nucleic Acid
attaagaaggctagctacaacgataattatt

SEQ ID NO: 3113 - DNA, 31 bp, Artificial Sequence
  Description of Artificial Sequence:  Enzymatic Nucleic Acid
cttaatgaggctagctacaacgataagaatt

SEQ ID NO: 3114 - DNA, 31 bp, Artificial Sequence
  Description of Artificial Sequence:  Enzymatic Nucleic Acid
tctcttaaggctagctacaacgagattaaga

SEQ ID NO: 3115 - DNA, 31 bp, Artificial Sequence
  Description of Artificial Sequence:  Enzymatic Nucleic Acid
tattatggggctagctacaacgactcttaat

SEQ ID NO: 3116 - DNA, 31 bp, Artificial Sequence
  Description of Artificial Sequence:  Enzymatic Nucleic Acid
atttattaggctagctacaacgaggtctctt

SEQ ID NO: 3117 - DNA, 31 bp, Artificial Sequence
  Description of Artificial Sequence:  Enzymatic Nucleic Acid
agtatttaggctagctacaacgatatggtct

SEQ ID NO: 3118 - DNA, 31 bp, Artificial Sequence
  Description of Artificial Sequence:  Enzymatic Nucleic Acid
aaggagtaggctagctacaacgattattatg

SEQ ID NO: 3119 - DNA, 31 bp, Artificial Sequence
  Description of Artificial Sequence:  Enzymatic Nucleic Acid
aaaaggagggctagctacaacgaatttatta

SEQ ID NO: 3120 - DNA, 31 bp, Artificial Sequence
  Description of Artificial Sequence:  Enzymatic Nucleic Acid
tggttttgggctagctacaacgattttctct

SEQ ID NO: 3121 - DNA, 31 bp, Artificial Sequence
  Description of Artificial Sequence:  Enzymatic Nucleic Acid
tctaatggggctagctacaacgatttgcttt

SEQ ID NO: 3122 - DNA, 31 bp, Artificial Sequence
  Description of Artificial Sequence:  Enzymatic Nucleic Acid
aattctaaggctagctacaacgaggttttgc

SEQ ID NO: 3123 - DNA, 31 bp, Artificial Sequence
  Description of Artificial Sequence:  Enzymatic Nucleic Acid
agtaacaaggctagctacaacgatctaatgg

SEQ ID NO: 3124 - DNA, 31 bp, Artificial Sequence
  Description of Artificial Sequence:  Enzymatic Nucleic Acid
ctgagtaaggctagctacaacgaaattctaa

SEQ ID NO: 3125 - DNA, 31 bp, Artificial Sequence
  Description of Artificial Sequence:  Enzymatic Nucleic Acid
gagctgagggctagctacaacgaaacaattc

SEQ ID NO: 3126 - DNA, 31 bp, Artificial Sequence
  Description of Artificial Sequence:  Enzymatic Nucleic Acid
tgaaggagggctagctacaacgatgagtaac

SEQ ID NO: 3127 - DNA, 31 bp, Artificial Sequence
  Description of Artificial Sequence:  Enzymatic Nucleic Acid
aacctgagggctagctacaacgattgaagga

SEQ ID NO: 3128 - DNA, 31 bp, Artificial Sequence
  Description of Artificial Sequence:  Enzymatic Nucleic Acid
gctacaaaggctagctacaacgactgagttt

SEQ ID NO: 3129 - DNA, 31 bp, Artificial Sequence
  Description of Artificial Sequence:  Enzymatic Nucleic Acid
gtatgctaggctagctacaacgaaaacctga

SEQ ID NO: 3130 - DNA, 31 bp, Artificial Sequence
  Description of Artificial Sequence:  Enzymatic Nucleic Acid
catgtatgggctagctacaacgatacaaacc

SEQ ID NO: 3131 - DNA, 31 bp, Artificial Sequence
  Description of Artificial Sequence:  Enzymatic Nucleic Acid
ctcatgtaggctagctacaacgagctacaaa

SEQ ID NO: 3132 - DNA, 31 bp, Artificial Sequence
  Description of Artificial Sequence:  Enzymatic Nucleic Acid
gactcatgggctagctacaacgaatgctaca

SEQ ID NO: 3133 - DNA, 31 bp, Artificial Sequence
  Description of Artificial Sequence:  Enzymatic Nucleic Acid
tggactcaggctagctacaacgagtatgcta

SEQ ID NO: 3134 - DNA, 31 bp, Artificial Sequence
  Description of Artificial Sequence:  Enzymatic Nucleic Acid
tggatggaggctagctacaacgatcatgtat

SEQ ID NO: 3135 - DNA, 31 bp, Artificial Sequence
  Description of Artificial Sequence:  Enzymatic Nucleic Acid
ctgatggaggctagctacaacgaggactcat

SEQ ID NO: 3136 - DNA, 31 bp, Artificial Sequence
  Description of Artificial Sequence:  Enzymatic Nucleic Acid
ttgactgaggctagctacaacgaggatggac

SEQ ID NO: 3137 - DNA, 31 bp, Artificial Sequence
  Description of Artificial Sequence:  Enzymatic Nucleic Acid
ttctttgaggctagctacaacgatgatggat

SEQ ID NO: 3138 - DNA, 31 bp, Artificial Sequence
  Description of Artificial Sequence:  Enzymatic Nucleic Acid
tggaaccaggctagctacaacgatctttgac

SEQ ID NO: 3139 - DNA, 31 bp, Artificial Sequence
  Description of Artificial Sequence:  Enzymatic Nucleic Acid
agatggaaggctagctacaacgacattcttt

SEQ ID NO: 3140 - DNA, 31 bp, Artificial Sequence
  Description of Artificial Sequence:  Enzymatic Nucleic Acid
actccagaggctagctacaacgaggaaccat

SEQ ID NO: 3141 - DNA, 31 bp, Artificial Sequence
  Description of Artificial Sequence:  Enzymatic Nucleic Acid
cattaagaggctagctacaacgatccagatg

SEQ ID NO: 3142 - DNA, 31 bp, Artificial Sequence
  Description of Artificial Sequence:  Enzymatic Nucleic Acid
tttctacaggctagctacaacgataagactc

SEQ ID NO: 3143 - DNA, 31 bp, Artificial Sequence
  Description of Artificial Sequence:  Enzymatic Nucleic Acid
tctttctaggctagctacaacgaattaagac

SEQ ID NO: 3144 - DNA, 31 bp, Artificial Sequence
  Description of Artificial Sequence:  Enzymatic Nucleic Acid
agtctccaggctagctacaacgattttcttt

SEQ ID NO: 3145 - DNA, 31 bp, Artificial Sequence
  Description of Artificial Sequence:  Enzymatic Nucleic Acid
attacaagggctagctacaacgactccattt

SEQ ID NO: 3146 - DNA, 31 bp, Artificial Sequence
  Description of Artificial Sequence:  Enzymatic Nucleic Acid
cattattaggctagctacaacgaaagtctcc

SEQ ID NO: 3147 - DNA, 31 bp, Artificial Sequence
  Description of Artificial Sequence:  Enzymatic Nucleic Acid
gctcattaggctagctacaacgatacaagtc

SEQ ID NO: 3148 - DNA, 31 bp, Artificial Sequence
  Description of Artificial Sequence:  Enzymatic Nucleic Acid
ctagctcaggctagctacaacgatattacaa

SEQ ID NO: 3149 - DNA, 31 bp, Artificial Sequence
  Description of Artificial Sequence:  Enzymatic Nucleic Acid
gtaactagggctagctacaacgatcattatt

SEQ ID NO: 3150 - DNA, 31 bp, Artificial Sequence
  Description of Artificial Sequence:  Enzymatic Nucleic Acid
ctttgtaaggctagctacaacgatagctcat

SEQ ID NO: 3151 - DNA, 31 bp, Artificial Sequence
  Description of Artificial Sequence:  Enzymatic Nucleic Acid
gcactttgggctagctacaacgaaactagct

SEQ ID NO: 3152 - DNA, 31 bp, Artificial Sequence
  Description of Artificial Sequence:  Enzymatic Nucleic Acid
aacaagcaggctagctacaacgatttgtaac

SEQ ID NO: 3153 - DNA, 31 bp, Artificial Sequence
  Description of Artificial Sequence:  Enzymatic Nucleic Acid
tgaacaagggctagctacaacgaactttgta

SEQ ID NO: 3154 - DNA, 31 bp, Artificial Sequence
  Description of Artificial Sequence:  Enzymatic Nucleic Acid
ttaatgaaggctagctacaacgaaagcactt

SEQ ID NO: 3155 - DNA, 31 bp, Artificial Sequence
  Description of Artificial Sequence:  Enzymatic Nucleic Acid
tattttaaggctagctacaacgagaacaagc

SEQ ID NO: 3156 - DNA, 31 bp, Artificial Sequence
  Description of Artificial Sequence:  Enzymatic Nucleic Acid
cagtgctaggctagctacaacgatttaatga

SEQ ID NO: 3157 - DNA, 31 bp, Artificial Sequence
  Description of Artificial Sequence:  Enzymatic Nucleic Acid
tttcagtgggctagctacaacgatattttaa

SEQ ID NO: 3158 - DNA, 31 bp, Artificial Sequence
  Description of Artificial Sequence:  Enzymatic Nucleic Acid
attttcagggctagctacaacgagctatttt

SEQ ID NO: 3159 - DNA, 31 bp, Artificial Sequence
  Description of Artificial Sequence:  Enzymatic Nucleic Acid
tgtttcaaggctagctacaacgatttcagtg

SEQ ID NO: 3160 - DNA, 31 bp, Artificial Sequence
  Description of Artificial Sequence:  Enzymatic Nucleic Acid
aattcatgggctagctacaacgattcaattt

SEQ ID NO: 3161 - DNA, 31 bp, Artificial Sequence
  Description of Artificial Sequence:  Enzymatic Nucleic Acid
ttaattcaggctagctacaacgagtttcaat

SEQ ID NO: 3162 - DNA, 31 bp, Artificial Sequence
  Description of Artificial Sequence:  Enzymatic Nucleic Acid
tcagttaaggctagctacaacgatcatgttt

SEQ ID NO: 3163 - DNA, 31 bp, Artificial Sequence
  Description of Artificial Sequence:  Enzymatic Nucleic Acid
attatcagggctagctacaacgataattcat

SEQ ID NO: 3164 - DNA, 31 bp, Artificial Sequence
  Description of Artificial Sequence:  Enzymatic Nucleic Acid
gaatattaggctagctacaacgacagttaat

SEQ ID NO: 3165 - DNA, 31 bp, Artificial Sequence
  Description of Artificial Sequence:  Enzymatic Nucleic Acid
ttggaataggctagctacaacgatatcagtt

SEQ ID NO: 3166 - DNA, 31 bp, Artificial Sequence
  Description of Artificial Sequence:  Enzymatic Nucleic Acid
gattggaaggctagctacaacgaattatcag

SEQ ID NO: 3167 - DNA, 31 bp, Artificial Sequence
  Description of Artificial Sequence:  Enzymatic Nucleic Acid
gcaaatgaggctagctacaacgatggaatat

SEQ ID NO: 3168 - DNA, 31 bp, Artificial Sequence
  Description of Artificial Sequence:  Enzymatic Nucleic Acid
atggcaaaggctagctacaacgagattggaa

SEQ ID NO: 3169 - DNA, 31 bp, Artificial Sequence
  Description of Artificial Sequence:  Enzymatic Nucleic Acid
ataaatggggctagctacaacgaaaatgatt

SEQ ID NO: 3170 - DNA, 31 bp, Artificial Sequence
  Description of Artificial Sequence:  Enzymatic Nucleic Acid
gtcataaaggctagctacaacgaggcaaatg

SEQ ID NO: 3171 - DNA, 31 bp, Artificial Sequence
  Description of Artificial Sequence:  Enzymatic Nucleic Acid
ttttgtcaggctagctacaacgaaaatggca

SEQ ID NO: 3172 - DNA, 31 bp, Artificial Sequence
  Description of Artificial Sequence:  Enzymatic Nucleic Acid
catttttgggctagctacaacgacataaatg

SEQ ID NO: 3173 - DNA, 31 bp, Artificial Sequence
  Description of Artificial Sequence:  Enzymatic Nucleic Acid
gccaaccaggctagctacaacgattttgtca

SEQ ID NO: 3174 - DNA, 31 bp, Artificial Sequence
  Description of Artificial Sequence:  Enzymatic Nucleic Acid
agtgccaaggctagctacaacgacatttttg

SEQ ID NO: 3175 - DNA, 31 bp, Artificial Sequence
  Description of Artificial Sequence:  Enzymatic Nucleic Acid
tgttagtgggctagctacaacgacaaccatt

SEQ ID NO: 3176 - DNA, 31 bp, Artificial Sequence
  Description of Artificial Sequence:  Enzymatic Nucleic Acid
tttgttagggctagctacaacgagccaacca

SEQ ID NO: 3177 - DNA, 31 bp, Artificial Sequence
  Description of Artificial Sequence:  Enzymatic Nucleic Acid
gttctttgggctagctacaacgatagtgcca

SEQ ID NO: 3178 - DNA, 31 bp, Artificial Sequence
  Description of Artificial Sequence:  Enzymatic Nucleic Acid
agtgctcgggctagctacaacgatctttgtt

SEQ ID NO: 3179 - DNA, 31 bp, Artificial Sequence
  Description of Artificial Sequence:  Enzymatic Nucleic Acid
aggaagtgggctagctacaacgatcgttctt

SEQ ID NO: 3180 - DNA, 31 bp, Artificial Sequence
  Description of Artificial Sequence:  Enzymatic Nucleic Acid
aaaggaagggctagctacaacgagctcgttc

SEQ ID NO: 3181 - DNA, 31 bp, Artificial Sequence
  Description of Artificial Sequence:  Enzymatic Nucleic Acid
ctcagaaaggctagctacaacgatctgaaag

SEQ ID NO: 3182 - DNA, 31 bp, Artificial Sequence
  Description of Artificial Sequence:  Enzymatic Nucleic Acid
gtacattaggctagctacaacgactcagaaa

SEQ ID NO: 3183 - DNA, 31 bp, Artificial Sequence
  Description of Artificial Sequence:  Enzymatic Nucleic Acid
cacgtacaggctagctacaacgatatctcag

SEQ ID NO: 3184 - DNA, 31 bp, Artificial Sequence
  Description of Artificial Sequence:  Enzymatic Nucleic Acid
tccacgtaggctagctacaacgaattatctc

SEQ ID NO: 3185 - DNA, 31 bp, Artificial Sequence
  Description of Artificial Sequence:  Enzymatic Nucleic Acid
gttccacgggctagctacaacgaacattatc

SEQ ID NO: 3186 - DNA, 31 bp, Artificial Sequence
  Description of Artificial Sequence:  Enzymatic Nucleic Acid
ctgttccaggctagctacaacgagtacatta

SEQ ID NO: 3187 - DNA, 31 bp, Artificial Sequence
  Description of Artificial Sequence:  Enzymatic Nucleic Acid
ccagactgggctagctacaacgatccacgta

SEQ ID NO: 3188 - DNA, 31 bp, Artificial Sequence
  Description of Artificial Sequence:  Enzymatic Nucleic Acid
cacccagaggctagctacaacgatgttccac

SEQ ID NO: 3189 - DNA, 31 bp, Artificial Sequence
  Description of Artificial Sequence:  Enzymatic Nucleic Acid
ccattccaggctagctacaacgaccagactg

SEQ ID NO: 3190 - DNA, 31 bp, Artificial Sequence
  Description of Artificial Sequence:  Enzymatic Nucleic Acid
cagccccaggctagctacaacgatccaccca

SEQ ID NO: 3191 - DNA, 31 bp, Artificial Sequence
  Description of Artificial Sequence:  Enzymatic Nucleic Acid
ggtttcagggctagctacaacgacccattcc

SEQ ID NO: 3192 - DNA, 31 bp, Artificial Sequence
  Description of Artificial Sequence:  Enzymatic Nucleic Acid
gcacatggggctagctacaacgattcagccc

SEQ ID NO: 3193 - DNA, 31 bp, Artificial Sequence
  Description of Artificial Sequence:  Enzymatic Nucleic Acid
cttgcacaggctagctacaacgaggtttcag

SEQ ID NO: 3194 - DNA, 31 bp, Artificial Sequence
  Description of Artificial Sequence:  Enzymatic Nucleic Acid
gacttgcaggctagctacaacgaatggtttc

SEQ ID NO: 3195 - DNA, 31 bp, Artificial Sequence
  Description of Artificial Sequence:  Enzymatic Nucleic Acid
cagacttgggctagctacaacgaacatggtt

SEQ ID NO: 3196 - DNA, 31 bp, Artificial Sequence
  Description of Artificial Sequence:  Enzymatic Nucleic Acid
gacacagaggctagctacaacgattgcacat

SEQ ID NO: 3197 - DNA, 31 bp, Artificial Sequence
  Description of Artificial Sequence:  Enzymatic Nucleic Acid
acaagacaggctagctacaacgaagacttgc

SEQ ID NO: 3198 - DNA, 31 bp, Artificial Sequence
  Description of Artificial Sequence:  Enzymatic Nucleic Acid
tgacaagaggctagctacaacgaacagactt

SEQ ID NO: 3199 - DNA, 31 bp, Artificial Sequence
  Description of Artificial Sequence:  Enzymatic Nucleic Acid
tggactgaggctagctacaacgaaagacaca

SEQ ID NO: 3200 - DNA, 31 bp, Artificial Sequence
  Description of Artificial Sequence:  Enzymatic Nucleic Acid
ttcttggaggctagctacaacgatgacaaga

SEQ ID NO: 3201 - DNA, 31 bp, Artificial Sequence
  Description of Artificial Sequence:  Enzymatic Nucleic Acid
cggtgtcaggctagctacaacgattcttgga

SEQ ID NO: 3202 - DNA, 31 bp, Artificial Sequence
  Description of Artificial Sequence:  Enzymatic Nucleic Acid
tctcggtgggctagctacaacgacacttctt

SEQ ID NO: 3203 - DNA, 31 bp, Artificial Sequence
  Description of Artificial Sequence:  Enzymatic Nucleic Acid
catctcggggctagctacaacgagtcacttc

SEQ ID NO: 3204 - DNA, 31 bp, Artificial Sequence
  Description of Artificial Sequence:  Enzymatic Nucleic Acid
aattaacaggctagctacaacgactcggtgt

SEQ ID NO: 3205 - DNA, 31 bp, Artificial Sequence
  Description of Artificial Sequence:  Enzymatic Nucleic Acid
aaaattaaggctagctacaacgaatctcggt

SEQ ID NO: 3206 - DNA, 31 bp, Artificial Sequence
  Description of Artificial Sequence:  Enzymatic Nucleic Acid
ccctaaaaggctagctacaacgataacatct

SEQ ID NO: 3207 - DNA, 31 bp, Artificial Sequence
  Description of Artificial Sequence:  Enzymatic Nucleic Acid
ggcacgggggctagctacaacgaccctaaaa

SEQ ID NO: 3208 - DNA, 31 bp, Artificial Sequence
  Description of Artificial Sequence:  Enzymatic Nucleic Acid
acaaggcaggctagctacaacgagggtccct

SEQ ID NO: 3209 - DNA, 31 bp, Artificial Sequence
  Description of Artificial Sequence:  Enzymatic Nucleic Acid
aaacaaggggctagctacaacgaacgggtcc

SEQ ID NO: 3210 - DNA, 31 bp, Artificial Sequence
  Description of Artificial Sequence:  Enzymatic Nucleic Acid
ctaggaaaggctagctacaacgaaaggcacg

SEQ ID NO: 3211 - DNA, 31 bp, Artificial Sequence
  Description of Artificial Sequence:  Enzymatic Nucleic Acid
cttgtgggggctagctacaacgataggaaac

SEQ ID NO: 3212 - DNA, 31 bp, Artificial Sequence
  Description of Artificial Sequence:  Enzymatic Nucleic Acid
cattcttgggctagctacaacgagggctagg

SEQ ID NO: 3213 - DNA, 31 bp, Artificial Sequence
  Description of Artificial Sequence:  Enzymatic Nucleic Acid
tgtttgcaggctagctacaacgatcttgtgg

SEQ ID NO: 3214 - DNA, 31 bp, Artificial Sequence
  Description of Artificial Sequence:  Enzymatic Nucleic Acid
gatgtttgggctagctacaacgaattcttgt

SEQ ID NO: 3215 - DNA, 31 bp, Artificial Sequence
  Description of Artificial Sequence:  Enzymatic Nucleic Acid
gtttgatgggctagctacaacgattgcattc

SEQ ID NO: 3216 - DNA, 31 bp, Artificial Sequence
  Description of Artificial Sequence:  Enzymatic Nucleic Acid
ctgtttgaggctagctacaacgagtttgcat

SEQ ID NO: 3217 - DNA, 31 bp, Artificial Sequence
  Description of Artificial Sequence:  Enzymatic Nucleic Acid
agtatctgggctagctacaacgattgatgtt

SEQ ID NO: 3218 - DNA, 31 bp, Artificial Sequence
  Description of Artificial Sequence:  Enzymatic Nucleic Acid
agcgagtaggctagctacaacgactgtttga

SEQ ID NO: 3219 - DNA, 31 bp, Artificial Sequence
  Description of Artificial Sequence:  Enzymatic Nucleic Acid
ctagcgagggctagctacaacgaatctgttt

SEQ ID NO: 3220 - DNA, 31 bp, Artificial Sequence
  Description of Artificial Sequence:  Enzymatic Nucleic Acid
gaggctagggctagctacaacgagagtatct

SEQ ID NO: 3221 - DNA, 31 bp, Artificial Sequence
  Description of Artificial Sequence:  Enzymatic Nucleic Acid
aaatgaggggctagctacaacgatagcgagt

SEQ ID NO: 3222 - DNA, 31 bp, Artificial Sequence
  Description of Artificial Sequence:  Enzymatic Nucleic Acid
aatttaaaggctagctacaacgagaggctag

SEQ ID NO: 3223 - DNA, 31 bp, Artificial Sequence
  Description of Artificial Sequence:  Enzymatic Nucleic Acid
ttaatcaaggctagctacaacgattaaatga

SEQ ID NO: 3224 - DNA, 31 bp, Artificial Sequence
  Description of Artificial Sequence:  Enzymatic Nucleic Acid
tcctttaaggctagctacaacgacaatttaa

SEQ ID NO: 3225 - DNA, 31 bp, Artificial Sequence
  Description of Artificial Sequence:  Enzymatic Nucleic Acid
aagatgcaggctagctacaacgatcctcctt

SEQ ID NO: 3226 - DNA, 31 bp, Artificial Sequence
  Description of Artificial Sequence:  Enzymatic Nucleic Acid
caaagatgggctagctacaacgaactcctcc

SEQ ID NO: 3227 - DNA, 31 bp, Artificial Sequence
  Description of Artificial Sequence:  Enzymatic Nucleic Acid
gccaaagaggctagctacaacgagcactcct

SEQ ID NO: 3228 - DNA, 31 bp, Artificial Sequence
  Description of Artificial Sequence:  Enzymatic Nucleic Acid
actgtcggggctagctacaacgacaaagatg

SEQ ID NO: 3229 - DNA, 31 bp, Artificial Sequence
  Description of Artificial Sequence:  Enzymatic Nucleic Acid
caccactgggctagctacaacgacggccaaa

SEQ ID NO: 3230 - DNA, 31 bp, Artificial Sequence
  Description of Artificial Sequence:  Enzymatic Nucleic Acid
ttacaccaggctagctacaacgatgtcggcc

SEQ ID NO: 3231 - DNA, 31 bp, Artificial Sequence
  Description of Artificial Sequence:  Enzymatic Nucleic Acid
cagttacaggctagctacaacgacactgtcg

SEQ ID NO: 3232 - DNA, 31 bp, Artificial Sequence
  Description of Artificial Sequence:  Enzymatic Nucleic Acid
cacagttaggctagctacaacgaaccactgt

SEQ ID NO: 3233 - DNA, 31 bp, Artificial Sequence
  Description of Artificial Sequence:  Enzymatic Nucleic Acid
acacacagggctagctacaacgatacaccac

SEQ ID NO: 3234 - DNA, 31 bp, Artificial Sequence
  Description of Artificial Sequence:  Enzymatic Nucleic Acid
cacacacaggctagctacaacgaagttacac

SEQ ID NO: 3235 - DNA, 31 bp, Artificial Sequence
  Description of Artificial Sequence:  Enzymatic Nucleic Acid
cacacacaggctagctacaacgaacagttac

SEQ ID NO: 3236 - DNA, 31 bp, Artificial Sequence
  Description of Artificial Sequence:  Enzymatic Nucleic Acid
cacacacaggctagctacaacgaacacagtt

SEQ ID NO: 3237 - DNA, 31 bp, Artificial Sequence
  Description of Artificial Sequence:  Enzymatic Nucleic Acid
cacacacaggctagctacaacgaacacacag

SEQ ID NO: 3238 - DNA, 31 bp, Artificial Sequence
  Description of Artificial Sequence:  Enzymatic Nucleic Acid
cacacacaggctagctacaacgaacacacac

SEQ ID NO: 3239 - DNA, 31 bp, Artificial Sequence; identical to SEQ ID NO: 3238
  Description of Artificial Sequence:  Enzymatic Nucleic Acid

SEQ ID NO: 3240 - DNA, 31 bp, Artificial Sequence; identical to SEQ ID NO: 3238
  Description of Artificial Sequence:  Enzymatic Nucleic Acid

SEQ ID NO: 3241 - DNA, 31 bp, Artificial Sequence; identical to SEQ ID NO: 3238
  Description of Artificial Sequence:  Enzymatic Nucleic Acid

SEQ ID NO: 3242 - DNA, 31 bp, Artificial Sequence; identical to SEQ ID NO: 3238
  Description of Artificial Sequence:  Enzymatic Nucleic Acid

SEQ ID NO: 3243 - DNA, 31 bp, Artificial Sequence; identical to SEQ ID NO: 3238
  Description of Artificial Sequence:  Enzymatic Nucleic Acid

SEQ ID NO: 3244 - DNA, 31 bp, Artificial Sequence; identical to SEQ ID NO: 3238
  Description of Artificial Sequence:  Enzymatic Nucleic Acid

SEQ ID NO: 3245 - DNA, 31 bp, Artificial Sequence; identical to SEQ ID NO: 3238
  Description of Artificial Sequence:  Enzymatic Nucleic Acid

SEQ ID NO: 3246 - DNA, 31 bp, Artificial Sequence; identical to SEQ ID NO: 3238
  Description of Artificial Sequence:  Enzymatic Nucleic Acid

SEQ ID NO: 3247 - DNA, 31 bp, Artificial Sequence; identical to SEQ ID NO: 3238
  Description of Artificial Sequence:  Enzymatic Nucleic Acid

SEQ ID NO: 3248 - DNA, 31 bp, Artificial Sequence; identical to SEQ ID NO: 3238
  Description of Artificial Sequence:  Enzymatic Nucleic Acid

SEQ ID NO: 3249 - DNA, 31 bp, Artificial Sequence; identical to SEQ ID NO: 3238
  Description of Artificial Sequence:  Enzymatic Nucleic Acid

SEQ ID NO: 3250 - DNA, 31 bp, Artificial Sequence; identical to SEQ ID NO: 3238
  Description of Artificial Sequence:  Enzymatic Nucleic Acid

SEQ ID NO: 3251 - DNA, 31 bp, Artificial Sequence
  Description of Artificial Sequence:  Enzymatic Nucleic Acid
cccacacaggctagctacaacgaacacacac

SEQ ID NO: 3252 - DNA, 31 bp, Artificial Sequence
  Description of Artificial Sequence:  Enzymatic Nucleic Acid
cacccacaggctagctacaacgaacacacac

SEQ ID NO: 3253 - DNA, 31 bp, Artificial Sequence
  Description of Artificial Sequence:  Enzymatic Nucleic Acid
cacacccaggctagctacaacgaacacacac

SEQ ID NO: 3254 - DNA, 31 bp, Artificial Sequence
  Description of Artificial Sequence:  Enzymatic Nucleic Acid
cacccacaggctagctacaacgaccacacac

SEQ ID NO: 3255 - DNA, 31 bp, Artificial Sequence
  Description of Artificial Sequence:  Enzymatic Nucleic Acid
tacacccaggctagctacaacgaacccacac

SEQ ID NO: 3256 - DNA, 31 bp, Artificial Sequence
  Description of Artificial Sequence:  Enzymatic Nucleic Acid
cacatacaggctagctacaacgaccacaccc

SEQ ID NO: 3257 - DNA, 31 bp, Artificial Sequence
  Description of Artificial Sequence:  Enzymatic Nucleic Acid
cacacataggctagctacaacgaacccacac

SEQ ID NO: 3258 - DNA, 31 bp, Artificial Sequence
  Description of Artificial Sequence:  Enzymatic Nucleic Acid
aacacacaggctagctacaacgaacacccac

SEQ ID NO: 3259 - DNA, 31 bp, Artificial Sequence
  Description of Artificial Sequence:  Enzymatic Nucleic Acid
aaaacacaggctagctacaacgaatacaccc

SEQ ID NO: 3260 - DNA, 31 bp, Artificial Sequence
  Description of Artificial Sequence:  Enzymatic Nucleic Acid
acaaaacaggctagctacaacgaacatacac

SEQ ID NO: 3261 - DNA, 31 bp, Artificial Sequence
  Description of Artificial Sequence:  Enzymatic Nucleic Acid
gcacaaaaggctagctacaacgaacacatac

SEQ ID NO: 3262 - DNA, 31 bp, Artificial Sequence
  Description of Artificial Sequence:  Enzymatic Nucleic Acid
gttatgcaggctagctacaacgaaaaacaca

SEQ ID NO: 3263 - DNA, 31 bp, Artificial Sequence
  Description of Artificial Sequence:  Enzymatic Nucleic Acid
tagttatgggctagctacaacgaacaaaaca

SEQ ID NO: 3264 - DNA, 31 bp, Artificial Sequence
  Description of Artificial Sequence:  Enzymatic Nucleic Acid
aatagttaggctagctacaacgagcacaaaa

SEQ ID NO: 3265 - DNA, 31 bp, Artificial Sequence
  Description of Artificial Sequence:  Enzymatic Nucleic Acid
ttaaatagggctagctacaacgatatgcaca

SEQ ID NO: 3266 - DNA, 31 bp, Artificial Sequence
  Description of Artificial Sequence:  Enzymatic Nucleic Acid
tccttaaaggctagctacaacgaagttatgc

SEQ ID NO: 3267 - DNA, 31 bp, Artificial Sequence
  Description of Artificial Sequence:  Enzymatic Nucleic Acid
aattccagggctagctacaacgattccttaa

SEQ ID NO: 3268 - DNA, 31 bp, Artificial Sequence
  Description of Artificial Sequence:  Enzymatic Nucleic Acid
ctttaaaaggctagctacaacgatccagttt

SEQ ID NO: 3269 - DNA, 31 bp, Artificial Sequence
  Description of Artificial Sequence:  Enzymatic Nucleic Acid
aaaagtaaggctagctacaacgatttaaaat

SEQ ID NO: 3270 - DNA, 31 bp, Artificial Sequence
  Description of Artificial Sequence:  Enzymatic Nucleic Acid
tataaaagggctagctacaacgaaactttaa

SEQ ID NO: 3271 - DNA, 31 bp, Artificial Sequence
  Description of Artificial Sequence:  Enzymatic Nucleic Acid
ggtttgtaggctagctacaacgaaaaagtaa

SEQ ID NO: 3272 - DNA, 31 bp, Artificial Sequence
  Description of Artificial Sequence:  Enzymatic Nucleic Acid
ttggtttgggctagctacaacgaataaaagt

SEQ ID NO: 3273 - DNA, 31 bp, Artificial Sequence
  Description of Artificial Sequence:  Enzymatic Nucleic Acid
attcttggggctagctacaacgattgtataa

SEQ ID NO: 3274 - DNA, 31 bp, Artificial Sequence
  Description of Artificial Sequence:  Enzymatic Nucleic Acid
agcatataggctagctacaacgatcttggtt

SEQ ID NO: 3275 - DNA, 31 bp, Artificial Sequence
  Description of Artificial Sequence:  Enzymatic Nucleic Acid
gtagcataggctagctacaacgaattcttgg

SEQ ID NO: 3276 - DNA, 31 bp, Artificial Sequence
  Description of Artificial Sequence:  Enzymatic Nucleic Acid
ctgtagcaggctagctacaacgaatattctt

SEQ ID NO: 3277 - DNA, 31 bp, Artificial Sequence
  Description of Artificial Sequence:  Enzymatic Nucleic Acid
atctgtagggctagctacaacgaatatattc

SEQ ID NO: 3278 - DNA, 31 bp, Artificial Sequence
  Description of Artificial Sequence:  Enzymatic Nucleic Acid
tatatctgggctagctacaacgaagcatata

SEQ ID NO: 3279 - DNA, 31 bp, Artificial Sequence
  Description of Artificial Sequence:  Enzymatic Nucleic Acid
gtcttataggctagctacaacgactgtagca

SEQ ID NO: 3280 - DNA, 31 bp, Artificial Sequence
  Description of Artificial Sequence:  Enzymatic Nucleic Acid
ctgtcttaggctagctacaacgaatctgtag

SEQ ID NO: 3281 - DNA, 31 bp, Artificial Sequence
  Description of Artificial Sequence:  Enzymatic Nucleic Acid
catgtctgggctagctacaacgacttatatc

SEQ ID NO: 3282 - DNA, 31 bp, Artificial Sequence
  Description of Artificial Sequence:  Enzymatic Nucleic Acid
aaaccatgggctagctacaacgactgtctta

SEQ ID NO: 3283 - DNA, 31 bp, Artificial Sequence
  Description of Artificial Sequence:  Enzymatic Nucleic Acid
ccaaaccaggctagctacaacgagtctgtct

SEQ ID NO: 3284 - DNA, 31 bp, Artificial Sequence
  Description of Artificial Sequence:  Enzymatic Nucleic Acid
ggaccaaaggctagctacaacgacatgtctg

SEQ ID NO: 3285 - DNA, 31 bp, Artificial Sequence
  Description of Artificial Sequence:  Enzymatic Nucleic Acid
atataggaggctagctacaacgacaaaccat

SEQ ID NO: 3286 - DNA, 31 bp, Artificial Sequence
  Description of Artificial Sequence:  Enzymatic Nucleic Acid
tagaaataggctagctacaacgaaggaccaa

SEQ ID NO: 3287 - DNA, 31 bp, Artificial Sequence
  Description of Artificial Sequence:  Enzymatic Nucleic Acid
actagaaaggctagctacaacgaataggacc

SEQ ID NO: 3288 - DNA, 31 bp, Artificial Sequence
  Description of Artificial Sequence:  Enzymatic Nucleic Acid
catcatgaggctagctacaacgatagaaata

SEQ ID NO: 3289 - DNA, 31 bp, Artificial Sequence
  Description of Artificial Sequence:  Enzymatic Nucleic Acid
attcatcaggctagctacaacgagactagaa

SEQ ID NO: 3290 - DNA, 31 bp, Artificial Sequence
  Description of Artificial Sequence:  Enzymatic Nucleic Acid
tacattcaggctagctacaacgacatgacta

SEQ ID NO: 3291 - DNA, 31 bp, Artificial Sequence
  Description of Artificial Sequence:  Enzymatic Nucleic Acid
aaaatacaggctagctacaacgatcatcatg

SEQ ID NO: 3292 - DNA, 31 bp, Artificial Sequence
  Description of Artificial Sequence:  Enzymatic Nucleic Acid
acaaaataggctagctacaacgaattcatca

SEQ ID NO: 3293 - DNA, 31 bp, Artificial Sequence
  Description of Artificial Sequence:  Enzymatic Nucleic Acid
atacaaaaggctagctacaacgaacattcat

SEQ ID NO: 3294 - DNA, 31 bp, Artificial Sequence
  Description of Artificial Sequence:  Enzymatic Nucleic Acid
atggtataggctagctacaacgaaaaataca

SEQ ID NO: 3295 - DNA, 31 bp, Artificial Sequence
  Description of Artificial Sequence:  Enzymatic Nucleic Acid
agatggtaggctagctacaacgaacaaaata

SEQ ID NO: 3296 - DNA, 31 bp, Artificial Sequence
  Description of Artificial Sequence:  Enzymatic Nucleic Acid
gaagatggggctagctacaacgaatacaaaa

SEQ ID NO: 3297 - DNA, 31 bp, Artificial Sequence
  Description of Artificial Sequence:  Enzymatic Nucleic Acid
tatgaagaggctagctacaacgaggtataca

SEQ ID NO: 3298 - DNA, 31 bp, Artificial Sequence
  Description of Artificial Sequence:  Enzymatic Nucleic Acid
atattataggctagctacaacgagaagatgg

SEQ ID NO: 3299 - DNA, 31 bp, Artificial Sequence
  Description of Artificial Sequence:  Enzymatic Nucleic Acid
gtatattaggctagctacaacgaatgaagat

SEQ ID NO: 3300 - DNA, 31 bp, Artificial Sequence
  Description of Artificial Sequence:  Enzymatic Nucleic Acid
taagtataggctagctacaacgatatatgaa

SEQ ID NO: 3301 - DNA, 31 bp, Artificial Sequence
  Description of Artificial Sequence:  Enzymatic Nucleic Acid
tttaagtaggctagctacaacgaattatatg

SEQ ID NO: 3302 - DNA, 31 bp, Artificial Sequence
  Description of Artificial Sequence:  Enzymatic Nucleic Acid
tttttaagggctagctacaacgaatattata

SEQ ID NO: 3303 - DNA, 31 bp, Artificial Sequence
  Description of Artificial Sequence:  Enzymatic Nucleic Acid
aagaaataggctagctacaacgattttaagt

SEQ ID NO: 3304 - DNA, 31 bp, Artificial Sequence
  Description of Artificial Sequence:  Enzymatic Nucleic Acid
ttaagaaaggctagctacaacgaatttttaa

SEQ ID NO: 3305 - DNA, 31 bp, Artificial Sequence
  Description of Artificial Sequence:  Enzymatic Nucleic Acid
aatcccaaggctagctacaacgataagaaat

SEQ ID NO: 3306 - DNA, 31 bp, Artificial Sequence
  Description of Artificial Sequence:  Enzymatic Nucleic Acid
attacaaaggctagctacaacgacccaatta

SEQ ID NO: 3307 - DNA, 31 bp, Artificial Sequence
  Description of Artificial Sequence:  Enzymatic Nucleic Acid
tacgattaggctagctacaacgaaaatccca

SEQ ID NO: 3308 - DNA, 31 bp, Artificial Sequence
  Description of Artificial Sequence:  Enzymatic Nucleic Acid
tggtacgaggctagctacaacgatacaaatc

SEQ ID NO: 3309 - DNA, 31 bp, Artificial Sequence
  Description of Artificial Sequence:  Enzymatic Nucleic Acid
agttggtaggctagctacaacgagattacaa

SEQ ID NO: 3310 - DNA, 31 bp, Artificial Sequence
  Description of Artificial Sequence:  Enzymatic Nucleic Acid
taagttggggctagctacaacgaacgattac

SEQ ID NO: 3311 - DNA, 31 bp, Artificial Sequence
  Description of Artificial Sequence:  Enzymatic Nucleic Acid
caattaagggctagctacaacgatggtacga

SEQ ID NO: 3312 - DNA, 31 bp, Artificial Sequence
  Description of Artificial Sequence:  Enzymatic Nucleic Acid
tttatcaaggctagctacaacgataagttgg

SEQ ID NO: 3313 - DNA, 31 bp, Artificial Sequence
  Description of Artificial Sequence:  Enzymatic Nucleic Acid
caagtttaggctagctacaacgacaattaag

SEQ ID NO: 3314 - DNA, 31 bp, Artificial Sequence
  Description of Artificial Sequence:  Enzymatic Nucleic Acid
ttgccaagggctagctacaacgattatcaat

SEQ ID NO: 3315 - DNA, 31 bp, Artificial Sequence
  Description of Artificial Sequence:  Enzymatic Nucleic Acid
agcagttgggctagctacaacgacaagttta

SEQ ID NO: 3316 - DNA, 31 bp, Artificial Sequence
  Description of Artificial Sequence:  Enzymatic Nucleic Acid
aaaagcagggctagctacaacgatgccaagt

SEQ ID NO: 3317 - DNA, 31 bp, Artificial Sequence
  Description of Artificial Sequence:  Enzymatic Nucleic Acid
cataaaagggctagctacaacgaagttgcca

SEQ ID NO: 3318 - DNA, 31 bp, Artificial Sequence
  Description of Artificial Sequence:  Enzymatic Nucleic Acid
acagaacaggctagctacaacgaaaaagcag

SEQ ID NO: 3319 - DNA, 31 bp, Artificial Sequence
  Description of Artificial Sequence:  Enzymatic Nucleic Acid
agacagaaggctagctacaacgaataaaagc

SEQ ID NO: 3320 - DNA, 31 bp, Artificial Sequence
  Description of Artificial Sequence:  Enzymatic Nucleic Acid
gaaggagaggctagctacaacgaagaacata

SEQ ID NO: 3321 - DNA, 31 bp, Artificial Sequence
  Description of Artificial Sequence:  Enzymatic Nucleic Acid
aaaatttaggctagctacaacgaggaaggag

SEQ ID NO: 3322 - DNA, 31 bp, Artificial Sequence
  Description of Artificial Sequence:  Enzymatic Nucleic Acid
ttgaaaaaggctagctacaacgattatggaa

SEQ ID NO: 3323 - DNA, 31 bp, Artificial Sequence
  Description of Artificial Sequence:  Enzymatic Nucleic Acid
aattagtaggctagctacaacgatttgaaaa

SEQ ID NO: 3324 - DNA, 31 bp, Artificial Sequence
  Description of Artificial Sequence:  Enzymatic Nucleic Acid
tgaattagggctagctacaacgaattttgaa

SEQ ID NO: 3325 - DNA, 31 bp, Artificial Sequence
  Description of Artificial Sequence:  Enzymatic Nucleic Acid
ttgttgaaggctagctacaacgatagtattt

SEQ ID NO: 3326 - DNA, 31 bp, Artificial Sequence
  Description of Artificial Sequence:  Enzymatic Nucleic Acid
tttctttgggctagctacaacgatgaattag

SEQ ID NO: 3327 - DNA, 31 bp, Artificial Sequence
  Description of Artificial Sequence:  Enzymatic Nucleic Acid
aaaaagagggctagctacaacgatttttctt

SEQ ID NO: 3328 - DNA, 31 bp, Artificial Sequence
  Description of Artificial Sequence:  Enzymatic Nucleic Acid
tgagtttaggctagctacaacgatttaggaa

SEQ ID NO: 3329 - DNA, 31 bp, Artificial Sequence
  Description of Artificial Sequence:  Enzymatic Nucleic Acid
aatttgagggctagctacaacgattatttta

SEQ ID NO: 3330 - DNA, 31 bp, Artificial Sequence
  Description of Artificial Sequence:  Enzymatic Nucleic Acid
aggataaaggctagctacaacgattgagttt

SEQ ID NO: 3331 - DNA, 31 bp, Artificial Sequence
  Description of Artificial Sequence:  Enzymatic Nucleic Acid
aacaaggaggctagctacaacgaaaatttga

SEQ ID NO: 3332 - DNA, 31 bp, Artificial Sequence
  Description of Artificial Sequence:  Enzymatic Nucleic Acid
gctctaaaggctagctacaacgaaaggataa

SEQ ID NO: 3333 - DNA, 31 bp, Artificial Sequence
  Description of Artificial Sequence:  Enzymatic Nucleic Acid
tttctctgggctagctacaacgatctaaaca

SEQ ID NO: 3334 - DNA, 31 bp, Artificial Sequence
  Description of Artificial Sequence:  Enzymatic Nucleic Acid
tttcttaaggctagctacaacgattttctct

SEQ ID NO: 3335 - DNA, 31 bp, Artificial Sequence
  Description of Artificial Sequence:  Enzymatic Nucleic Acid
tttcaaagggctagctacaacgattttctta

SEQ ID NO: 3336 - DNA, 31 bp, Artificial Sequence
  Description of Artificial Sequence:  Enzymatic Nucleic Acid
tgagaccaggctagctacaacgattcaaagt

SEQ ID NO: 3337 - DNA, 31 bp, Artificial Sequence
  Description of Artificial Sequence:  Enzymatic Nucleic Acid
ttttgagaggctagctacaacgacatttcaa

SEQ ID NO: 3338 - DNA, 31 bp, Artificial Sequence
  Description of Artificial Sequence:  Enzymatic Nucleic Acid
tttagcaaggctagctacaacgatttttgag

SEQ ID NO: 3339 - DNA, 31 bp, Artificial Sequence
  Description of Artificial Sequence:  Enzymatic Nucleic Acid
atatttagggctagctacaacgaaatttttt

SEQ ID NO: 3340 - DNA, 31 bp, Artificial Sequence
  Description of Artificial Sequence:  Enzymatic Nucleic Acid
tgaaaataggctagctacaacgattagcaat

SEQ ID NO: 3341 - DNA, 31 bp, Artificial Sequence
  Description of Artificial Sequence:  Enzymatic Nucleic Acid
attgaaaaggctagctacaacgaatttagca

SEQ ID NO: 3342 - DNA, 31 bp, Artificial Sequence
  Description of Artificial Sequence:  Enzymatic Nucleic Acid
gttttccaggctagctacaacgatgaaaata

SEQ ID NO: 3343 - DNA, 31 bp, Artificial Sequence
  Description of Artificial Sequence:  Enzymatic Nucleic Acid
acatttagggctagctacaacgatttccatt

SEQ ID NO: 3344 - DNA, 31 bp, Artificial Sequence
  Description of Artificial Sequence:  Enzymatic Nucleic Acid
aactaacaggctagctacaacgattagtttt

SEQ ID NO: 3345 - DNA, 31 bp, Artificial Sequence
  Description of Artificial Sequence:  Enzymatic Nucleic Acid
taaactaaggctagctacaacgaatttagtt

SEQ ID NO: 3346 - DNA, 31 bp, Artificial Sequence
  Description of Artificial Sequence:  Enzymatic Nucleic Acid
cagctaaaggctagctacaacgataacattt

SEQ ID NO: 3347 - DNA, 31 bp, Artificial Sequence
  Description of Artificial Sequence:  Enzymatic Nucleic Acid
acaatcagggctagctacaacgataaactaa

SEQ ID NO: 3348 - DNA, 31 bp, Artificial Sequence
  Description of Artificial Sequence:  Enzymatic Nucleic Acid
ccatacaaggctagctacaacgacagctaaa

SEQ ID NO: 3349 - DNA, 31 bp, Artificial Sequence
  Description of Artificial Sequence:  Enzymatic Nucleic Acid
accccataggctagctacaacgaaatcagct

SEQ ID NO: 3350 - DNA, 31 bp, Artificial Sequence
  Description of Artificial Sequence:  Enzymatic Nucleic Acid
aaaccccaggctagctacaacgaacaatcag

SEQ ID NO: 3351 - DNA, 31 bp, Artificial Sequence
  Description of Artificial Sequence:  Enzymatic Nucleic Acid
ttcgaaaaggctagctacaacgacccataca

SEQ ID NO: 3352 - DNA, 31 bp, Artificial Sequence
  Description of Artificial Sequence:  Enzymatic Nucleic Acid
gtgaaaggggctagctacaacgatcgaaaac

SEQ ID NO: 3353 - DNA, 31 bp, Artificial Sequence
  Description of Artificial Sequence:  Enzymatic Nucleic Acid
acaaaaagggctagctacaacgagaaaggtt

SEQ ID NO: 3354 - DNA, 31 bp, Artificial Sequence
  Description of Artificial Sequence:  Enzymatic Nucleic Acid
aaaacaaaggctagctacaacgaaaaaagtg

SEQ ID NO: 3355 - DNA, 31 bp, Artificial Sequence
  Description of Artificial Sequence:  Enzymatic Nucleic Acid
aggtaaaaggctagctacaacgaaaacaaaa

SEQ ID NO: 3356 - DNA, 31 bp, Artificial Sequence
  Description of Artificial Sequence:  Enzymatic Nucleic Acid
gaaataggggctagctacaacgaaaaacaaa

SEQ ID NO: 3357 - DNA, 31 bp, Artificial Sequence
  Description of Artificial Sequence:  Enzymatic Nucleic Acid
ttgtgaaaggctagctacaacgaaggtaaaa

SEQ ID NO: 3358 - DNA, 31 bp, Artificial Sequence
  Description of Artificial Sequence:  Enzymatic Nucleic Acid
cacagttgggctagctacaacgagaaatagg

SEQ ID NO: 3359 - DNA, 31 bp, Artificial Sequence
  Description of Artificial Sequence:  Enzymatic Nucleic Acid
ttacacagggctagctacaacgatgtgaaat

SEQ ID NO: 3360 - DNA, 31 bp, Artificial Sequence
  Description of Artificial Sequence:  Enzymatic Nucleic Acid
aatttacaggctagctacaacgaagttgtga

SEQ ID NO: 3361 - DNA, 31 bp, Artificial Sequence
  Description of Artificial Sequence:  Enzymatic Nucleic Acid
gcaatttaggctagctacaacgaacagttgt

SEQ ID NO: 3362 - DNA, 31 bp, Artificial Sequence
  Description of Artificial Sequence:  Enzymatic Nucleic Acid
attggcaaggctagctacaacgattacacag

SEQ ID NO: 3363 - DNA, 31 bp, Artificial Sequence
  Description of Artificial Sequence:  Enzymatic Nucleic Acid
attattggggctagctacaacgaaatttaca

SEQ ID NO: 3364 - DNA, 31 bp, Artificial Sequence
  Description of Artificial Sequence:  Enzymatic Nucleic Acid
aggaattaggctagctacaacgatggcaatt

SEQ ID NO: 3365 - DNA, 31 bp, Artificial Sequence
  Description of Artificial Sequence:  Enzymatic Nucleic Acid
gacaggaaggctagctacaacgatattggca

SEQ ID NO: 3366 - DNA, 31 bp, Artificial Sequence
  Description of Artificial Sequence:  Enzymatic Nucleic Acid
ttcatggaggctagctacaacgaaggaatta

SEQ ID NO: 3367 - DNA, 31 bp, Artificial Sequence
  Description of Artificial Sequence:  Enzymatic Nucleic Acid
cattttcaggctagctacaacgaggacagga

SEQ ID NO: 3368 - DNA, 31 bp, Artificial Sequence
  Description of Artificial Sequence:  Enzymatic Nucleic Acid
aatttgcaggctagctacaacgatttcatgg

SEQ ID NO: 3369 - DNA, 31 bp, Artificial Sequence
  Description of Artificial Sequence:  Enzymatic Nucleic Acid
ataatttgggctagctacaacgaattttcat

SEQ ID NO: 3370 - DNA, 31 bp, Artificial Sequence
  Description of Artificial Sequence:  Enzymatic Nucleic Acid
ctggataaggctagctacaacgattgcattt

SEQ ID NO: 3371 - DNA, 31 bp, Artificial Sequence
  Description of Artificial Sequence:  Enzymatic Nucleic Acid
acactggaggctagctacaacgaaatttgca

SEQ ID NO: 3372 - DNA, 31 bp, Artificial Sequence
  Description of Artificial Sequence:  Enzymatic Nucleic Acid
tatctacaggctagctacaacgatggataat

SEQ ID NO: 3373 - DNA, 31 bp, Artificial Sequence
  Description of Artificial Sequence:  Enzymatic Nucleic Acid
tatatctaggctagctacaacgaactggata

SEQ ID NO: 3374 - DNA, 31 bp, Artificial Sequence
  Description of Artificial Sequence:  Enzymatic Nucleic Acid
caaatataggctagctacaacgactacactg

SEQ ID NO: 3375 - DNA, 31 bp, Artificial Sequence
  Description of Artificial Sequence:  Enzymatic Nucleic Acid
gtcaaataggctagctacaacgaatctacac

SEQ ID NO: 3376 - DNA, 31 bp, Artificial Sequence
  Description of Artificial Sequence:  Enzymatic Nucleic Acid
tggtcaaaggctagctacaacgaatatctac

SEQ ID NO: 3377 - DNA, 31 bp, Artificial Sequence
  Description of Artificial Sequence:  Enzymatic Nucleic Acid
ggtgatggggctagctacaacgacaaatata

SEQ ID NO: 3378 - DNA, 31 bp, Artificial Sequence
  Description of Artificial Sequence:  Enzymatic Nucleic Acid
tagggtgaggctagctacaacgaggtcaaat

SEQ ID NO: 3379 - DNA, 31 bp, Artificial Sequence
  Description of Artificial Sequence:  Enzymatic Nucleic Acid
ccatagggggctagctacaacgagatggtca

SEQ ID NO: 3380 - DNA, 31 bp, Artificial Sequence
  Description of Artificial Sequence:  Enzymatic Nucleic Acid
aatatccaggctagctacaacgaagggtgat

SEQ ID NO: 3381 - DNA, 31 bp, Artificial Sequence
  Description of Artificial Sequence:  Enzymatic Nucleic Acid
agccaataggctagctacaacgaccataggg

SEQ ID NO: 3382 - DNA, 31 bp, Artificial Sequence
  Description of Artificial Sequence:  Enzymatic Nucleic Acid
ctagccaaggctagctacaacgaatccatag

SEQ ID NO: 3383 - DNA, 31 bp, Artificial Sequence
  Description of Artificial Sequence:  Enzymatic Nucleic Acid
aaaactagggctagctacaacgacaatatcc

SEQ ID NO: 3384 - DNA, 31 bp, Artificial Sequence
  Description of Artificial Sequence:  Enzymatic Nucleic Acid
aggcaaaaggctagctacaacgatagccaat

SEQ ID NO: 3385 - DNA, 31 bp, Artificial Sequence
  Description of Artificial Sequence:  Enzymatic Nucleic Acid
aataaaggggctagctacaacgaaaaactag

SEQ ID NO: 3386 - DNA, 31 bp, Artificial Sequence
  Description of Artificial Sequence:  Enzymatic Nucleic Acid
ttgcttaaggctagctacaacgaaaaggcaa

SEQ ID NO: 3387 - DNA, 31 bp, Artificial Sequence
  Description of Artificial Sequence:  Enzymatic Nucleic Acid
tgaatttgggctagctacaacgattaataaa

SEQ ID NO: 3388 - DNA, 31 bp, Artificial Sequence
  Description of Artificial Sequence:  Enzymatic Nucleic Acid
gaaatgaaggctagctacaacgattgcttaa

SEQ ID NO: 3389 - DNA, 31 bp, Artificial Sequence
  Description of Artificial Sequence:  Enzymatic Nucleic Acid
ggctgaaaggctagctacaacgagaatttgc

SEQ ID NO: 3390 - DNA, 31 bp, Artificial Sequence
  Description of Artificial Sequence:  Enzymatic Nucleic Acid
cattcaggggctagctacaacgatgaaatga

SEQ ID NO: 3391 - DNA, 31 bp, Artificial Sequence
  Description of Artificial Sequence:  Enzymatic Nucleic Acid
ggcagacaggctagctacaacgatcaggctg

SEQ ID NO: 3392 - DNA, 31 bp, Artificial Sequence
  Description of Artificial Sequence:  Enzymatic Nucleic Acid
taggcagaggctagctacaacgaattcaggc

SEQ ID NO: 3393 - DNA, 31 bp, Artificial Sequence
  Description of Artificial Sequence:  Enzymatic Nucleic Acid
tatataggggctagctacaacgaagacattc

SEQ ID NO: 3394 - DNA, 31 bp, Artificial Sequence
  Description of Artificial Sequence:  Enzymatic Nucleic Acid
agaatataggctagctacaacgaaggcagac

SEQ ID NO: 3395 - DNA, 31 bp, Artificial Sequence
  Description of Artificial Sequence:  Enzymatic Nucleic Acid
agagaataggctagctacaacgaataggcag

SEQ ID NO: 3396 - DNA, 31 bp, Artificial Sequence
  Description of Artificial Sequence:  Enzymatic Nucleic Acid
gcagagaaggctagctacaacgaatataggc

SEQ ID NO: 3397 - DNA, 31 bp, Artificial Sequence
  Description of Artificial Sequence:  Enzymatic Nucleic Acid
acaaagagggctagctacaacgaagagaata

SEQ ID NO: 3398 - DNA, 31 bp, Artificial Sequence
  Description of Artificial Sequence:  Enzymatic Nucleic Acid
ggagaataggctagctacaacgaaaagagca

SEQ ID NO: 3399 - DNA, 31 bp, Artificial Sequence
  Description of Artificial Sequence:  Enzymatic Nucleic Acid
aaggagaaggctagctacaacgaacaaagag

SEQ ID NO: 3400 - DNA, 31 bp, Artificial Sequence
  Description of Artificial Sequence:  Enzymatic Nucleic Acid
ttaacgggggctagctacaacgatcaaagga

SEQ ID NO: 3401 - DNA, 31 bp, Artificial Sequence
  Description of Artificial Sequence:  Enzymatic Nucleic Acid
tgttttaaggctagctacaacgagggttcaa

SEQ ID NO: 3402 - DNA, 31 bp, Artificial Sequence
  Description of Artificial Sequence:  Enzymatic Nucleic Acid
acaggatgggctagctacaacgatttaacgg

SEQ ID NO: 3403 - DNA, 31 bp, Artificial Sequence
  Description of Artificial Sequence:  Enzymatic Nucleic Acid
ccacaggaggctagctacaacgagttttaac

SEQ ID NO: 3404 - DNA, 31 bp, Artificial Sequence
  Description of Artificial Sequence:  Enzymatic Nucleic Acid
gagtgccaggctagctacaacgaaggatgtt

SEQ ID NO: 3405 - RNA, 17 nt, Homo Sapiens
gucccgggaccccggga

SEQ ID NO: 3406 - RNA, 17 nt, Homo Sapiens
ccgggagagcggucagu

SEQ ID NO: 3407 - RNA, 17 nt, Homo Sapiens
ggagagcggucagugug

SEQ ID NO: 3408 - RNA, 17 nt, Homo Sapiens
agcggucaguguguggu

SEQ ID NO: 3409 - RNA, 17 nt, Homo Sapiens
cggucaguguguggucg

SEQ ID NO: 3410 - RNA, 17 nt, Homo Sapiens
gucaguguguggucgcu

SEQ ID NO: 3411 - RNA, 17 nt, Homo Sapiens
aguguguggucgcugcg

SEQ ID NO: 3412 - RNA, 17 nt, Homo Sapiens
guguggucgcugcguuu

SEQ ID NO: 3413 - RNA, 17 nt, Homo Sapiens
uggucgcugcguuuccu

SEQ ID NO: 3414 - RNA, 17 nt, Homo Sapiens
gucgcugcguuuccucu

SEQ ID NO: 3415 - RNA, 17 nt, Homo Sapiens
uuuccucugccugcgcc

SEQ ID NO: 3416 - RNA, 17 nt, Homo Sapiens
cucugccugcgccgggc

SEQ ID NO: 3417 - RNA, 17 nt, Homo Sapiens
cugccugcgccgggcau

SEQ ID NO: 3418 - RNA, 17 nt, Homo Sapiens
ugcgccgggcaucacuu

SEQ ID NO: 3419 - RNA, 17 nt, Homo Sapiens
cgccgggcaucacuugc

SEQ ID NO: 3420 - RNA, 17 nt, Homo Sapiens
cgggcaucacuugcgcg

SEQ ID NO: 3421 - RNA, 17 nt, Homo Sapiens
caucacuugcgcgccgc

SEQ ID NO: 3422 - RNA, 17 nt, Homo Sapiens
ucacuugcgcgccgcag

SEQ ID NO: 3423 - RNA, 17 nt, Homo Sapiens
acuugcgcgccgcagaa

SEQ ID NO: 3424 - RNA, 17 nt, Homo Sapiens
ugcgcgccgcagaaagu

SEQ ID NO: 3425 - RNA, 17 nt, Homo Sapiens
cgcagaaaguccgucug

SEQ ID NO: 3426 - RNA, 17 nt, Homo Sapiens
gaaaguccgucuggcag

SEQ ID NO: 3427 - RNA, 17 nt, Homo Sapiens
uccgucuggcagccugg

SEQ ID NO: 3428 - RNA, 17 nt, Homo Sapiens
gucuggcagccuggaua

SEQ ID NO: 3429 - RNA, 17 nt, Homo Sapiens
cagccuggauauccucu

SEQ ID NO: 3430 - RNA, 17 nt, Homo Sapiens
gccuggauauccucucc

SEQ ID NO: 3431 - RNA, 17 nt, Homo Sapiens
ccucuccuaccggcacc

SEQ ID NO: 3432 - RNA, 17 nt, Homo Sapiens
uccuaccggcacccgca

SEQ ID NO: 3433 - RNA, 17 nt, Homo Sapiens
cuaccggcacccgcaga

SEQ ID NO: 3434 - RNA, 17 nt, Homo Sapiens
cggcacccgcagacgcc

SEQ ID NO: 3435 - RNA, 17 nt, Homo Sapiens
acccgcagacgccccug

SEQ ID NO: 3436 - RNA, 17 nt, Homo Sapiens
ccgcagacgccccugca

SEQ ID NO: 3437 - RNA, 17 nt, Homo Sapiens
acgccccugcagccgcc

SEQ ID NO: 3438 - RNA, 17 nt, Homo Sapiens
ccccugcagccgccggu

SEQ ID NO: 3439 - RNA, 17 nt, Homo Sapiens
cugcagccgccggucgg

SEQ ID NO: 3440 - RNA, 17 nt, Homo Sapiens
agccgccggucggcgcc

SEQ ID NO: 3441 - RNA, 17 nt, Homo Sapiens
gccggucggcgcccggg

SEQ ID NO: 3442 - RNA, 17 nt, Homo Sapiens
cggucggcgcccgggcu

SEQ ID NO: 3443 - RNA, 17 nt, Homo Sapiens
gcgcccgggcucccuag

SEQ ID NO: 3444 - RNA, 17 nt, Homo Sapiens
gcucccuagcccugugc

SEQ ID NO: 3445 - RNA, 17 nt, Homo Sapiens
cuagcccugugcgcuca

SEQ ID NO: 3446 - RNA, 17 nt, Homo Sapiens
agcccugugcgcucaac

SEQ ID NO: 3447 - RNA, 17 nt, Homo Sapiens
cccugugcgcucaacug

SEQ ID NO: 3448 - RNA, 17 nt, Homo Sapiens
ugcgcucaacuguccug

SEQ ID NO: 3449 - RNA, 17 nt, Homo Sapiens
gcucaacuguccugcgc

SEQ ID NO: 3450 - RNA, 17 nt, Homo Sapiens
acuguccugcgcugcgg

SEQ ID NO: 3451 - RNA, 17 nt, Homo Sapiens
uguccugcgcugcgggg

SEQ ID NO: 3452 - RNA, 17 nt, Homo Sapiens
ccugcgcugcggggugc

SEQ ID NO: 3453 - RNA, 17 nt, Homo Sapiens
gcugcggggugccgcga

SEQ ID NO: 3454 - RNA, 17 nt, Homo Sapiens
ugcggggugccgcgagu

SEQ ID NO: 3455 - RNA, 17 nt, Homo Sapiens
ggggugccgcgaguucc

SEQ ID NO: 3456 - RNA, 17 nt, Homo Sapiens
ugccgcgaguuccaccu

SEQ ID NO: 3457 - RNA, 17 nt, Homo Sapiens
cgaguuccaccuccgcg

SEQ ID NO: 3458 - RNA, 17 nt, Homo Sapiens
ccaccuccgcgccuccu

SEQ ID NO: 3459 - RNA, 17 nt, Homo Sapiens
accuccgcgccuccuuc

SEQ ID NO: 3460 - RNA, 17 nt, Homo Sapiens
uucucuagacaggcgcu

SEQ ID NO: 3461 - RNA, 17 nt, Homo Sapiens
cuagacaggcgcuggga

SEQ ID NO: 3462 - RNA, 17 nt, Homo Sapiens
agacaggcgcugggaga

SEQ ID NO: 3463 - RNA, 17 nt, Homo Sapiens
gagaaagaaccggcucc

SEQ ID NO: 3464 - RNA, 17 nt, Homo Sapiens
aagaaccggcucccgag

SEQ ID NO: 3465 - RNA, 17 nt, Homo Sapiens
gcucccgaguucugggc

SEQ ID NO: 3466 - RNA, 17 nt, Homo Sapiens
aguucugggcauuucgc

SEQ ID NO: 3467 - RNA, 17 nt, Homo Sapiens
uucugggcauuucgccc

SEQ ID NO: 3468 - RNA, 17 nt, Homo Sapiens
ggcauuucgcccggcuc

SEQ ID NO: 3469 - RNA, 17 nt, Homo Sapiens
uucgcccggcucgaggu

SEQ ID NO: 3470 - RNA, 17 nt, Homo Sapiens
ggcucgaggugcaggau

SEQ ID NO: 3471 - RNA, 17 nt, Homo Sapiens
cucgaggugcaggaugc

SEQ ID NO: 3472 - RNA, 17 nt, Homo Sapiens
ggugcaggaugcagagc

SEQ ID NO: 3473 - RNA, 17 nt, Homo Sapiens
ugcaggaugcagagcaa

SEQ ID NO: 3474 - RNA, 17 nt, Homo Sapiens
gaugcagagcaaggugc

SEQ ID NO: 3475 - RNA, 17 nt, Homo Sapiens
agagcaaggugcugcug

SEQ ID NO: 3476 - RNA, 17 nt, Homo Sapiens
agcaaggugcugcuggc

SEQ ID NO: 3477 - RNA, 17 nt, Homo Sapiens
aaggugcugcuggccgu

SEQ ID NO: 3478 - RNA, 17 nt, Homo Sapiens
ugcugcuggccgucgcc

SEQ ID NO: 3479 - RNA, 17 nt, Homo Sapiens
ugcuggccgucgcccug

SEQ ID NO: 3480 - RNA, 17 nt, Homo Sapiens
uggccgucgcccugugg

SEQ ID NO: 3481 - RNA, 17 nt, Homo Sapiens
gucgcccuguggcucug

SEQ ID NO: 3482 - RNA, 17 nt, Homo Sapiens
gcccuguggcucugcgu

SEQ ID NO: 3483 - RNA, 17 nt, Homo Sapiens
guggcucugcguggaga

SEQ ID NO: 3484 - RNA, 17 nt, Homo Sapiens
ggcucugcguggagacc

SEQ ID NO: 3485 - RNA, 17 nt, Homo Sapiens
gcguggagacccgggcc

SEQ ID NO: 3486 - RNA, 17 nt, Homo Sapiens
agacccgggccgccucu

SEQ ID NO: 3487 - RNA, 17 nt, Homo Sapiens
cccgggccgccucugug

SEQ ID NO: 3488 - RNA, 17 nt, Homo Sapiens
ccgccucuguggguuug

SEQ ID NO: 3489 - RNA, 17 nt, Homo Sapiens
cucuguggguuugccua

SEQ ID NO: 3490 - RNA, 17 nt, Homo Sapiens
guggguuugccuagugu

SEQ ID NO: 3491 - RNA, 17 nt, Homo Sapiens
uuugccuaguguuucuc

SEQ ID NO: 3492 - RNA, 17 nt, Homo Sapiens
ugccuaguguuucucuu

SEQ ID NO: 3493 - RNA, 17 nt, Homo Sapiens
uucucuugaucugccca

SEQ ID NO: 3494 - RNA, 17 nt, Homo Sapiens
cuugaucugcccaggcu

SEQ ID NO: 3495 - RNA, 17 nt, Homo Sapiens
cugcccaggcucagcau

SEQ ID NO: 3496 - RNA, 17 nt, Homo Sapiens
caggcucagcauacaaa

SEQ ID NO: 3497 - RNA, 17 nt, Homo Sapiens
ggcucagcauacaaaaa

SEQ ID NO: 3498 - RNA, 17 nt, Homo Sapiens
cucagcauacaaaaaga

SEQ ID NO: 3499 - RNA, 17 nt, Homo Sapiens
acaaaaagacauacuua

SEQ ID NO: 3500 - RNA, 17 nt, Homo Sapiens
aaaaagacauacuuaca

SEQ ID NO: 3501 - RNA, 17 nt, Homo Sapiens
aaagacauacuuacaau

SEQ ID NO: 3502 - RNA, 17 nt, Homo Sapiens
acauacuuacaauuaag

SEQ ID NO: 3503 - RNA, 17 nt, Homo Sapiens
uacuuacaauuaaggcu

SEQ ID NO: 3504 - RNA, 17 nt, Homo Sapiens
caauuaaggcuaauaca

SEQ ID NO: 3505 - RNA, 17 nt, Homo Sapiens
uaaggcuaauacaacuc

SEQ ID NO: 3506 - RNA, 17 nt, Homo Sapiens
aggcuaauacaacucuu

SEQ ID NO: 3507 - RNA, 17 nt, Homo Sapiens
cuaauacaacucuucaa

SEQ ID NO: 3508 - RNA, 17 nt, Homo Sapiens
cucuucaaauuacuugc

SEQ ID NO: 3509 - RNA, 17 nt, Homo Sapiens
uucaaauuacuugcagg

SEQ ID NO: 3510 - RNA, 17 nt, Homo Sapiens
aauuacuugcaggggac

SEQ ID NO: 3511 - RNA, 17 nt, Homo Sapiens
ugcaggggacagaggga

SEQ ID NO: 3512 - RNA, 17 nt, Homo Sapiens
acagagggacuuggacu

SEQ ID NO: 3513 - RNA, 17 nt, Homo Sapiens
ggacuuggacuggcuuu

SEQ ID NO: 3514 - RNA, 17 nt, Homo Sapiens
uuggacuggcuuuggcc

SEQ ID NO: 3515 - RNA, 17 nt, Homo Sapiens
uggcuuuggcccaauaa

SEQ ID NO: 3516 - RNA, 17 nt, Homo Sapiens
uuggcccaauaaucaga

SEQ ID NO: 3517 - RNA, 17 nt, Homo Sapiens
gcccaauaaucagagug

SEQ ID NO: 3518 - RNA, 17 nt, Homo Sapiens
uaaucagaguggcagug

SEQ ID NO: 3519 - RNA, 17 nt, Homo Sapiens
ucagaguggcagugagc

SEQ ID NO: 3520 - RNA, 17 nt, Homo Sapiens
gaguggcagugagcaaa

SEQ ID NO: 3521 - RNA, 17 nt, Homo Sapiens
ggcagugagcaaagggu

SEQ ID NO: 3522 - RNA, 17 nt, Homo Sapiens
agcaaaggguggaggug

SEQ ID NO: 3523 - RNA, 17 nt, Homo Sapiens
ggguggaggugacugag

SEQ ID NO: 3524 - RNA, 17 nt, Homo Sapiens
uggaggugacugagugc

SEQ ID NO: 3525 - RNA, 17 nt, Homo Sapiens
gugacugagugcagcga

SEQ ID NO: 3526 - RNA, 17 nt, Homo Sapiens
gacugagugcagcgaug

SEQ ID NO: 3527 - RNA, 17 nt, Homo Sapiens
ugagugcagcgauggcc

SEQ ID NO: 3528 - RNA, 17 nt, Homo Sapiens
gugcagcgauggccucu

SEQ ID NO: 3529 - RNA, 17 nt, Homo Sapiens
cagcgauggccucuucu

SEQ ID NO: 3530 - RNA, 17 nt, Homo Sapiens
ccucuucuguaagacac

SEQ ID NO: 3531 - RNA, 17 nt, Homo Sapiens
ucuguaagacacucaca

SEQ ID NO: 3532 - RNA, 17 nt, Homo Sapiens
uguaagacacucacaau

SEQ ID NO: 3533 - RNA, 17 nt, Homo Sapiens
agacacucacaauucca

SEQ ID NO: 3534 - RNA, 17 nt, Homo Sapiens
cacucacaauuccaaaa

SEQ ID NO: 3535 - RNA, 17 nt, Homo Sapiens
uuccaaaagugaucgga

SEQ ID NO: 3536 - RNA, 17 nt, Homo Sapiens
caaaagugaucggaaau

SEQ ID NO: 3537 - RNA, 17 nt, Homo Sapiens
gaucggaaaugacacug

SEQ ID NO: 3538 - RNA, 17 nt, Homo Sapiens
cggaaaugacacuggag

SEQ ID NO: 3539 - RNA, 17 nt, Homo Sapiens
gaaaugacacuggagcc

SEQ ID NO: 3540 - RNA, 17 nt, Homo Sapiens
acacuggagccuacaag

SEQ ID NO: 3541 - RNA, 17 nt, Homo Sapiens
uggagccuacaagugcu

SEQ ID NO: 3542 - RNA, 17 nt, Homo Sapiens
gccuacaagugcuucua

SEQ ID NO: 3543 - RNA, 17 nt, Homo Sapiens
cuacaagugcuucuacc

SEQ ID NO: 3544 - RNA, 17 nt, Homo Sapiens
gugcuucuaccgggaaa

SEQ ID NO: 3545 - RNA, 17 nt, Homo Sapiens
accgggaaacugacuug

SEQ ID NO: 3546 - RNA, 17 nt, Homo Sapiens
ggaaacugacuuggccu

SEQ ID NO: 3547 - RNA, 17 nt, Homo Sapiens
cugacuuggccucgguc

SEQ ID NO: 3548 - RNA, 17 nt, Homo Sapiens
uggccucggucauuuau

SEQ ID NO: 3549 - RNA, 17 nt, Homo Sapiens
ccucggucauuuauguc

SEQ ID NO: 3550 - RNA, 17 nt, Homo Sapiens
ggucauuuaugucuaug

SEQ ID NO: 3551 - RNA, 17 nt, Homo Sapiens
ucauuuaugucuauguu

SEQ ID NO: 3552 - RNA, 17 nt, Homo Sapiens
uuaugucuauguucaag

SEQ ID NO: 3553 - RNA, 17 nt, Homo Sapiens
augucuauguucaagau

SEQ ID NO: 3554 - RNA, 17 nt, Homo Sapiens
uguucaagauuacagau

SEQ ID NO: 3555 - RNA, 17 nt, Homo Sapiens
ucaagauuacagaucuc

SEQ ID NO: 3556 - RNA, 17 nt, Homo Sapiens
gauuacagaucuccauu

SEQ ID NO: 3557 - RNA, 17 nt, Homo Sapiens
agaucuccauuuauugc

SEQ ID NO: 3558 - RNA, 17 nt, Homo Sapiens
cuccauuuauugcuucu

SEQ ID NO: 3559 - RNA, 17 nt, Homo Sapiens
cauuuauugcuucuguu

SEQ ID NO: 3560 - RNA, 17 nt, Homo Sapiens
uugcuucuguuagugac

SEQ ID NO: 3561 - RNA, 17 nt, Homo Sapiens
uucuguuagugaccaac

SEQ ID NO: 3562 - RNA, 17 nt, Homo Sapiens
uguuagugaccaacaug

SEQ ID NO: 3563 - RNA, 17 nt, Homo Sapiens
agugaccaacauggagu

SEQ ID NO: 3564 - RNA, 17 nt, Homo Sapiens
ugaccaacauggagucg

SEQ ID NO: 3565 - RNA, 17 nt, Homo Sapiens
aacauggagucguguac

SEQ ID NO: 3566 - RNA, 17 nt, Homo Sapiens
auggagucguguacauu

SEQ ID NO: 3567 - RNA, 17 nt, Homo Sapiens
ggagucguguacauuac

SEQ ID NO: 3568 - RNA, 17 nt, Homo Sapiens
agucguguacauuacug

SEQ ID NO: 3569 - RNA, 17 nt, Homo Sapiens
ucguguacauuacugag

SEQ ID NO: 3570 - RNA, 17 nt, Homo Sapiens
uguacauuacugagaac

SEQ ID NO: 3571 - RNA, 17 nt, Homo Sapiens
uacugagaacaaaaaca

SEQ ID NO: 3572 - RNA, 17 nt, Homo Sapiens
gaacaaaaacaaaacug

SEQ ID NO: 3573 - RNA, 17 nt, Homo Sapiens
aaaacaaaacuguggug

SEQ ID NO: 3574 - RNA, 17 nt, Homo Sapiens
acaaaacuguggugauu

SEQ ID NO: 3575 - RNA, 17 nt, Homo Sapiens
aaacuguggugauucca

SEQ ID NO: 3576 - RNA, 17 nt, Homo Sapiens
cuguggugauuccaugu

SEQ ID NO: 3577 - RNA, 17 nt, Homo Sapiens
gugauuccaugucucgg

SEQ ID NO: 3578 - RNA, 17 nt, Homo Sapiens
gauuccaugucucgggu

SEQ ID NO: 3579 - RNA, 17 nt, Homo Sapiens
ugucucggguccauuuc

SEQ ID NO: 3580 - RNA, 17 nt, Homo Sapiens
ucggguccauuucaaau

SEQ ID NO: 3581 - RNA, 17 nt, Homo Sapiens
cauuucaaaucucaacg

SEQ ID NO: 3582 - RNA, 17 nt, Homo Sapiens
aaaucucaacgugucac

SEQ ID NO: 3583 - RNA, 17 nt, Homo Sapiens
aucucaacgugucacuu

SEQ ID NO: 3584 - RNA, 17 nt, Homo Sapiens
cucaacgugucacuuug

SEQ ID NO: 3585 - RNA, 17 nt, Homo Sapiens
aacgugucacuuugugc

SEQ ID NO: 3586 - RNA, 17 nt, Homo Sapiens
gucacuuugugcaagau

SEQ ID NO: 3587 - RNA, 17 nt, Homo Sapiens
cacuuugugcaagauac

SEQ ID NO: 3588 - RNA, 17 nt, Homo Sapiens
ugugcaagauacccaga

SEQ ID NO: 3589 - RNA, 17 nt, Homo Sapiens
ugcaagauacccagaaa

SEQ ID NO: 3590 - RNA, 17 nt, Homo Sapiens
gaaaagagauuuguucc

SEQ ID NO: 3591 - RNA, 17 nt, Homo Sapiens
agagauuuguuccugau

SEQ ID NO: 3592 - RNA, 17 nt, Homo Sapiens
uguuccugaugguaaca

SEQ ID NO: 3593 - RNA, 17 nt, Homo Sapiens
uccugaugguaacagaa

SEQ ID NO: 3594 - RNA, 17 nt, Homo Sapiens
ugaugguaacagaauuu

SEQ ID NO: 3595 - RNA, 17 nt, Homo Sapiens
guaacagaauuuccugg

SEQ ID NO: 3596 - RNA, 17 nt, Homo Sapiens
uuccugggacagcaaga

SEQ ID NO: 3597 - RNA, 17 nt, Homo Sapiens
cugggacagcaagaagg

SEQ ID NO: 3598 - RNA, 17 nt, Homo Sapiens
caagaagggcuuuacua

SEQ ID NO: 3599 - RNA, 17 nt, Homo Sapiens
agggcuuuacuauuccc

SEQ ID NO: 3600 - RNA, 17 nt, Homo Sapiens
gcuuuacuauucccagc

SEQ ID NO: 3601 - RNA, 17 nt, Homo Sapiens
uauucccagcuacauga

SEQ ID NO: 3602 - RNA, 17 nt, Homo Sapiens
ucccagcuacaugauca

SEQ ID NO: 3603 - RNA, 17 nt, Homo Sapiens
ccagcuacaugaucagc

SEQ ID NO: 3604 - RNA, 17 nt, Homo Sapiens
gcuacaugaucagcuau

SEQ ID NO: 3605 - RNA, 17 nt, Homo Sapiens
caugaucagcuaugcug

SEQ ID NO: 3606 - RNA, 17 nt, Homo Sapiens
gaucagcuaugcuggca

SEQ ID NO: 3607 - RNA, 17 nt, Homo Sapiens
ucagcuaugcuggcaug

SEQ ID NO: 3608 - RNA, 17 nt, Homo Sapiens
cuaugcuggcauggucu

SEQ ID NO: 3609 - RNA, 17 nt, Homo Sapiens
augcuggcauggucuuc

SEQ ID NO: 3610 - RNA, 17 nt, Homo Sapiens
cuggcauggucuucugu

SEQ ID NO: 3611 - RNA, 17 nt, Homo Sapiens
ggucuucugugaagcaa

SEQ ID NO: 3612 - RNA, 17 nt, Homo Sapiens
ucugugaagcaaaaauu

SEQ ID NO: 3613 - RNA, 17 nt, Homo Sapiens
aagcaaaaauuaaugau

SEQ ID NO: 3614 - RNA, 17 nt, Homo Sapiens
aaaaauuaaugaugaaa

SEQ ID NO: 3615 - RNA, 17 nt, Homo Sapiens
aauuaaugaugaaaguu

SEQ ID NO: 3616 - RNA, 17 nt, Homo Sapiens
ugaugaaaguuaccagu

SEQ ID NO: 3617 - RNA, 17 nt, Homo Sapiens
ugaaaguuaccagucua

SEQ ID NO: 3618 - RNA, 17 nt, Homo Sapiens
aguuaccagucuauuau

SEQ ID NO: 3619 - RNA, 17 nt, Homo Sapiens
accagucuauuauguac

SEQ ID NO: 3620 - RNA, 17 nt, Homo Sapiens
agucuauuauguacaua

SEQ ID NO: 3621 - RNA, 17 nt, Homo Sapiens
ucuauuauguacauagu

SEQ ID NO: 3622 - RNA, 17 nt, Homo Sapiens
uauuauguacauaguug

SEQ ID NO: 3623 - RNA, 17 nt, Homo Sapiens
uuauguacauaguuguc

SEQ ID NO: 3624 - RNA, 17 nt, Homo Sapiens
uguacauaguugucguu

SEQ ID NO: 3625 - RNA, 17 nt, Homo Sapiens
acauaguugucguugua

SEQ ID NO: 3626 - RNA, 17 nt, Homo Sapiens
uaguugucguuguaggg

SEQ ID NO: 3627 - RNA, 17 nt, Homo Sapiens
uugucguuguaggguau

SEQ ID NO: 3628 - RNA, 17 nt, Homo Sapiens
guuguaggguauaggau

SEQ ID NO: 3629 - RNA, 17 nt, Homo Sapiens
uguaggguauaggauuu

SEQ ID NO: 3630 - RNA, 17 nt, Homo Sapiens
gguauaggauuuaugau

SEQ ID NO: 3631 - RNA, 17 nt, Homo Sapiens
uaggauuuaugaugugg

SEQ ID NO: 3632 - RNA, 17 nt, Homo Sapiens
gauuuaugaugugguuc

SEQ ID NO: 3633 - RNA, 17 nt, Homo Sapiens
uuuaugaugugguucug

SEQ ID NO: 3634 - RNA, 17 nt, Homo Sapiens
augaugugguucugagu

SEQ ID NO: 3635 - RNA, 17 nt, Homo Sapiens
gguucugaguccgucuc

SEQ ID NO: 3636 - RNA, 17 nt, Homo Sapiens
cugaguccgucucaugg

SEQ ID NO: 3637 - RNA, 17 nt, Homo Sapiens
uccgucucauggaauug

SEQ ID NO: 3638 - RNA, 17 nt, Homo Sapiens
cucauggaauugaacua

SEQ ID NO: 3639 - RNA, 17 nt, Homo Sapiens
ggaauugaacuaucugu

SEQ ID NO: 3640 - RNA, 17 nt, Homo Sapiens
auugaacuaucuguugg

SEQ ID NO: 3641 - RNA, 17 nt, Homo Sapiens
aacuaucuguuggagaa

SEQ ID NO: 3642 - RNA, 17 nt, Homo Sapiens
ggagaaaagcuugucuu

SEQ ID NO: 3643 - RNA, 17 nt, Homo Sapiens
aaaagcuugucuuaaau

SEQ ID NO: 3644 - RNA, 17 nt, Homo Sapiens
ugucuuaaauuguacag

SEQ ID NO: 3645 - RNA, 17 nt, Homo Sapiens
cuuaaauuguacagcaa

SEQ ID NO: 3646 - RNA, 17 nt, Homo Sapiens
uaaauuguacagcaaga

SEQ ID NO: 3647 - RNA, 17 nt, Homo Sapiens
auuguacagcaagaacu

SEQ ID NO: 3648 - RNA, 17 nt, Homo Sapiens
cagcaagaacugaacua

SEQ ID NO: 3649 - RNA, 17 nt, Homo Sapiens
agaacugaacuaaaugu

SEQ ID NO: 3650 - RNA, 17 nt, Homo Sapiens
ugaacuaaaugugggga

SEQ ID NO: 3651 - RNA, 17 nt, Homo Sapiens
aacuaaauguggggauu

SEQ ID NO: 3652 - RNA, 17 nt, Homo Sapiens
auguggggauugacuuc

SEQ ID NO: 3653 - RNA, 17 nt, Homo Sapiens
ggggauugacuucaacu

SEQ ID NO: 3654 - RNA, 17 nt, Homo Sapiens
ugacuucaacugggaau

SEQ ID NO: 3655 - RNA, 17 nt, Homo Sapiens
aacugggaauacccuuc

SEQ ID NO: 3656 - RNA, 17 nt, Homo Sapiens
cugggaauacccuucuu

SEQ ID NO: 3657 - RNA, 17 nt, Homo Sapiens
ucuucgaagcaucagca

SEQ ID NO: 3658 - RNA, 17 nt, Homo Sapiens
uucgaagcaucagcaua

SEQ ID NO: 3659 - RNA, 17 nt, Homo Sapiens
aagcaucagcauaagaa

SEQ ID NO: 3660 - RNA, 17 nt, Homo Sapiens
gcaucagcauaagaaac

SEQ ID NO: 3661 - RNA, 17 nt, Homo Sapiens
cauaagaaacuuguaaa

SEQ ID NO: 3662 - RNA, 17 nt, Homo Sapiens
agaaacuuguaaaccga

SEQ ID NO: 3663 - RNA, 17 nt, Homo Sapiens
acuuguaaaccgagacc

SEQ ID NO: 3664 - RNA, 17 nt, Homo Sapiens
aaaccgagaccuaaaaa

SEQ ID NO: 3665 - RNA, 17 nt, Homo Sapiens
accuaaaaacccagucu

SEQ ID NO: 3666 - RNA, 17 nt, Homo Sapiens
aaaacccagucugggag

SEQ ID NO: 3667 - RNA, 17 nt, Homo Sapiens
gucugggagugagauga

SEQ ID NO: 3668 - RNA, 17 nt, Homo Sapiens
ggagugagaugaagaaa

SEQ ID NO: 3669 - RNA, 17 nt, Homo Sapiens
augaagaaauuuuugag

SEQ ID NO: 3670 - RNA, 17 nt, Homo Sapiens
auuuuugagcaccuuaa

SEQ ID NO: 3671 - RNA, 17 nt, Homo Sapiens
uuuugagcaccuuaacu

SEQ ID NO: 3672 - RNA, 17 nt, Homo Sapiens
gcaccuuaacuauagau

SEQ ID NO: 3673 - RNA, 17 nt, Homo Sapiens
ccuuaacuauagauggu

SEQ ID NO: 3674 - RNA, 17 nt, Homo Sapiens
aacuauagaugguguaa

SEQ ID NO: 3675 - RNA, 17 nt, Homo Sapiens
uauagaugguguaaccc

SEQ ID NO: 3676 - RNA, 17 nt, Homo Sapiens
uagaugguguaacccgg

SEQ ID NO: 3677 - RNA, 17 nt, Homo Sapiens
augguguaacccggagu

SEQ ID NO: 3678 - RNA, 17 nt, Homo Sapiens
aacccggagugaccaag

SEQ ID NO: 3679 - RNA, 17 nt, Homo Sapiens
ccggagugaccaaggau

SEQ ID NO: 3680 - RNA, 17 nt, Homo Sapiens
gaccaaggauuguacac

SEQ ID NO: 3681 - RNA, 17 nt, Homo Sapiens
caaggauuguacaccug

SEQ ID NO: 3682 - RNA, 17 nt, Homo Sapiens
aggauuguacaccugug

SEQ ID NO: 3683 - RNA, 17 nt, Homo Sapiens
gauuguacaccugugca

SEQ ID NO: 3684 - RNA, 17 nt, Homo Sapiens
guacaccugugcagcau

SEQ ID NO: 3685 - RNA, 17 nt, Homo Sapiens
acaccugugcagcaucc

SEQ ID NO: 3686 - RNA, 17 nt, Homo Sapiens
ccugugcagcauccagu

SEQ ID NO: 3687 - RNA, 17 nt, Homo Sapiens
ugugcagcauccagugg

SEQ ID NO: 3688 - RNA, 17 nt, Homo Sapiens
agcauccagugggcuga

SEQ ID NO: 3689 - RNA, 17 nt, Homo Sapiens
uccagugggcugaugac

SEQ ID NO: 3690 - RNA, 17 nt, Homo Sapiens
gugggcugaugaccaag

SEQ ID NO: 3691 - RNA, 17 nt, Homo Sapiens
ggcugaugaccaagaag

SEQ ID NO: 3692 - RNA, 17 nt, Homo Sapiens
caagaagaacagcacau

SEQ ID NO: 3693 - RNA, 17 nt, Homo Sapiens
gaagaacagcacauuug

SEQ ID NO: 3694 - RNA, 17 nt, Homo Sapiens
agaacagcacauuuguc

SEQ ID NO: 3695 - RNA, 17 nt, Homo Sapiens
aacagcacauuugucag

SEQ ID NO: 3696 - RNA, 17 nt, Homo Sapiens
gcacauuugucaggguc

SEQ ID NO: 3697 - RNA, 17 nt, Homo Sapiens
uugucaggguccaugaa

SEQ ID NO: 3698 - RNA, 17 nt, Homo Sapiens
caggguccaugaaaaac

SEQ ID NO: 3699 - RNA, 17 nt, Homo Sapiens
caugaaaaaccuuuugu

SEQ ID NO: 3700 - RNA, 17 nt, Homo Sapiens
aaccuuuuguugcuuuu

SEQ ID NO: 3701 - RNA, 17 nt, Homo Sapiens
cuuuuguugcuuuugga

SEQ ID NO: 3702 - RNA, 17 nt, Homo Sapiens
uuuuggaaguggcaugg

SEQ ID NO: 3703 - RNA, 17 nt, Homo Sapiens
uggaaguggcauggaau

SEQ ID NO: 3704 - RNA, 17 nt, Homo Sapiens
gaaguggcauggaaucu

SEQ ID NO: 3705 - RNA, 17 nt, Homo Sapiens
ggcauggaaucucuggu

SEQ ID NO: 3706 - RNA, 17 nt, Homo Sapiens
aaucucugguggaagcc

SEQ ID NO: 3707 - RNA, 17 nt, Homo Sapiens
ugguggaagccacggug

SEQ ID NO: 3708 - RNA, 17 nt, Homo Sapiens
uggaagccacggugggg

SEQ ID NO: 3709 - RNA, 17 nt, Homo Sapiens
aagccacggugggggag

SEQ ID NO: 3710 - RNA, 17 nt, Homo Sapiens
gugggggagcgugucag

SEQ ID NO: 3711 - RNA, 17 nt, Homo Sapiens
gggggagcgugucagaa

SEQ ID NO: 3712 - RNA, 17 nt, Homo Sapiens
gggagcgugucagaauc

SEQ ID NO: 3713 - RNA, 17 nt, Homo Sapiens
gugucagaaucccugcg

SEQ ID NO: 3714 - RNA, 17 nt, Homo Sapiens
gaaucccugcgaaguac

SEQ ID NO: 3715 - RNA, 17 nt, Homo Sapiens
ccugcgaaguaccuugg

SEQ ID NO: 3716 - RNA, 17 nt, Homo Sapiens
ugcgaaguaccuugguu

SEQ ID NO: 3717 - RNA, 17 nt, Homo Sapiens
guaccuugguuacccac

SEQ ID NO: 3718 - RNA, 17 nt, Homo Sapiens
ccuugguuacccacccc

SEQ ID NO: 3719 - RNA, 17 nt, Homo Sapiens
gguuacccacccccaga

SEQ ID NO: 3720 - RNA, 17 nt, Homo Sapiens
ccccagaaauaaaaugg

SEQ ID NO: 3721 - RNA, 17 nt, Homo Sapiens
gaaauaaaaugguauaa

SEQ ID NO: 3722 - RNA, 17 nt, Homo Sapiens
auaaaaugguauaaaaa

SEQ ID NO: 3723 - RNA, 17 nt, Homo Sapiens
aaaaugguauaaaaaug

SEQ ID NO: 3724 - RNA, 17 nt, Homo Sapiens
guauaaaaauggaauac

SEQ ID NO: 3725 - RNA, 17 nt, Homo Sapiens
aaaauggaauaccccuu

SEQ ID NO: 3726 - RNA, 17 nt, Homo Sapiens
aauggaauaccccuuga

SEQ ID NO: 3727 - RNA, 17 nt, Homo Sapiens
ccccuugaguccaauca

SEQ ID NO: 3728 - RNA, 17 nt, Homo Sapiens
ugaguccaaucacacaa

SEQ ID NO: 3729 - RNA, 17 nt, Homo Sapiens
guccaaucacacaauua

SEQ ID NO: 3730 - RNA, 17 nt, Homo Sapiens
ccaaucacacaauuaaa

SEQ ID NO: 3731 - RNA, 17 nt, Homo Sapiens
aucacacaauuaaagcg

SEQ ID NO: 3732 - RNA, 17 nt, Homo Sapiens
caauuaaagcggggcau

SEQ ID NO: 3733 - RNA, 17 nt, Homo Sapiens
aaagcggggcauguacu

SEQ ID NO: 3734 - RNA, 17 nt, Homo Sapiens
agcggggcauguacuga

SEQ ID NO: 3735 - RNA, 17 nt, Homo Sapiens
cggggcauguacugacg

SEQ ID NO: 3736 - RNA, 17 nt, Homo Sapiens
gggcauguacugacgau

SEQ ID NO: 3737 - RNA, 17 nt, Homo Sapiens
auguacugacgauuaug

SEQ ID NO: 3738 - RNA, 17 nt, Homo Sapiens
uacugacgauuauggaa

SEQ ID NO: 3739 - RNA, 17 nt, Homo Sapiens
ugacgauuauggaagug

SEQ ID NO: 3740 - RNA, 17 nt, Homo Sapiens
uuauggaagugagugaa

SEQ ID NO: 3741 - RNA, 17 nt, Homo Sapiens
ggaagugagugaaagag

SEQ ID NO: 3742 - RNA, 17 nt, Homo Sapiens
ugaaagagacacaggaa

SEQ ID NO: 3743 - RNA, 17 nt, Homo Sapiens
aaagagacacaggaaau

SEQ ID NO: 3744 - RNA, 17 nt, Homo Sapiens
cacaggaaauuacacug

SEQ ID NO: 3745 - RNA, 17 nt, Homo Sapiens
aggaaauuacacuguca

SEQ ID NO: 3746 - RNA, 17 nt, Homo Sapiens
gaaauuacacugucauc

SEQ ID NO: 3747 - RNA, 17 nt, Homo Sapiens
auuacacugucauccuu

SEQ ID NO: 3748 - RNA, 17 nt, Homo Sapiens
acacugucauccuuacc

SEQ ID NO: 3749 - RNA, 17 nt, Homo Sapiens
ucauccuuaccaauccc

SEQ ID NO: 3750 - RNA, 17 nt, Homo Sapiens
ccuuaccaaucccauuu

SEQ ID NO: 3751 - RNA, 17 nt, Homo Sapiens
ccaaucccauuucaaag

SEQ ID NO: 3752 - RNA, 17 nt, Homo Sapiens
aaggagaagcagagcca

SEQ ID NO: 3753 - RNA, 17 nt, Homo Sapiens
gaagcagagccaugugg

SEQ ID NO: 3754 - RNA, 17 nt, Homo Sapiens
gcagagccauguggucu

SEQ ID NO: 3755 - RNA, 17 nt, Homo Sapiens
agagccauguggucucu

SEQ ID NO: 3756 - RNA, 17 nt, Homo Sapiens
gccauguggucucucug

SEQ ID NO: 3757 - RNA, 17 nt, Homo Sapiens
ucucucugguuguguau

SEQ ID NO: 3758 - RNA, 17 nt, Homo Sapiens
cucugguuguguauguc

SEQ ID NO: 3759 - RNA, 17 nt, Homo Sapiens
cugguuguguauguccc

SEQ ID NO: 3760 - RNA, 17 nt, Homo Sapiens
gguuguguaugucccac

SEQ ID NO: 3761 - RNA, 17 nt, Homo Sapiens
uuguguaugucccaccc

SEQ ID NO: 3762 - RNA, 17 nt, Homo Sapiens
uaugucccaccccagau

SEQ ID NO: 3763 - RNA, 17 nt, Homo Sapiens
caccccagauuggugag

SEQ ID NO: 3764 - RNA, 17 nt, Homo Sapiens
ccagauuggugagaaau

SEQ ID NO: 3765 - RNA, 17 nt, Homo Sapiens
ggugagaaaucucuaau

SEQ ID NO: 3766 - RNA, 17 nt, Homo Sapiens
aaucucuaaucucuccu

SEQ ID NO: 3767 - RNA, 17 nt, Homo Sapiens
ucucuccuguggauucc

SEQ ID NO: 3768 - RNA, 17 nt, Homo Sapiens
uccuguggauuccuacc

SEQ ID NO: 3769 - RNA, 17 nt, Homo Sapiens
ggauuccuaccaguacg

SEQ ID NO: 3770 - RNA, 17 nt, Homo Sapiens
uccuaccaguacggcac

SEQ ID NO: 3771 - RNA, 17 nt, Homo Sapiens
cuaccaguacggcacca

SEQ ID NO: 3772 - RNA, 17 nt, Homo Sapiens
ccaguacggcaccacuc

SEQ ID NO: 3773 - RNA, 17 nt, Homo Sapiens
aguacggcaccacucaa

SEQ ID NO: 3774 - RNA, 17 nt, Homo Sapiens
acggcaccacucaaacg

SEQ ID NO: 3775 - RNA, 17 nt, Homo Sapiens
ccacucaaacgcugaca

SEQ ID NO: 3776 - RNA, 17 nt, Homo Sapiens
acucaaacgcugacaug

SEQ ID NO: 3777 - RNA, 17 nt, Homo Sapiens
aaacgcugacauguacg

SEQ ID NO: 3778 - RNA, 17 nt, Homo Sapiens
acgcugacauguacggu

SEQ ID NO: 3779 - RNA, 17 nt, Homo Sapiens
gcugacauguacggucu

SEQ ID NO: 3780 - RNA, 17 nt, Homo Sapiens
ugacauguacggucuau

SEQ ID NO: 3781 - RNA, 17 nt, Homo Sapiens
cauguacggucuaugcc

SEQ ID NO: 3782 - RNA, 17 nt, Homo Sapiens
uacggucuaugccauuc

SEQ ID NO: 3783 - RNA, 17 nt, Homo Sapiens
cggucuaugccauuccu

SEQ ID NO: 3784 - RNA, 17 nt, Homo Sapiens
ucuaugccauuccuccc

SEQ ID NO: 3785 - RNA, 17 nt, Homo Sapiens
ccucccccgcaucacau

SEQ ID NO: 3786 - RNA, 17 nt, Homo Sapiens
ucccccgcaucacaucc

SEQ ID NO: 3787 - RNA, 17 nt, Homo Sapiens
cccgcaucacauccacu

SEQ ID NO: 3788 - RNA, 17 nt, Homo Sapiens
cgcaucacauccacugg

SEQ ID NO: 3789 - RNA, 17 nt, Homo Sapiens
ucacauccacugguauu

SEQ ID NO: 3790 - RNA, 17 nt, Homo Sapiens
auccacugguauuggca

SEQ ID NO: 3791 - RNA, 17 nt, Homo Sapiens
ccacugguauuggcagu

SEQ ID NO: 3792 - RNA, 17 nt, Homo Sapiens
ugguauuggcaguugga

SEQ ID NO: 3793 - RNA, 17 nt, Homo Sapiens
uauuggcaguuggagga

SEQ ID NO: 3794 - RNA, 17 nt, Homo Sapiens
gaggaagagugcgccaa

SEQ ID NO: 3795 - RNA, 17 nt, Homo Sapiens
ggaagagugcgccaacg

SEQ ID NO: 3796 - RNA, 17 nt, Homo Sapiens
aagagugcgccaacgag

SEQ ID NO: 3797 - RNA, 17 nt, Homo Sapiens
gugcgccaacgagccca

SEQ ID NO: 3798 - RNA, 17 nt, Homo Sapiens
gccaacgagcccagcca

SEQ ID NO: 3799 - RNA, 17 nt, Homo Sapiens
cgagcccagccaagcug

SEQ ID NO: 3800 - RNA, 17 nt, Homo Sapiens
ccagccaagcugucuca

SEQ ID NO: 3801 - RNA, 17 nt, Homo Sapiens
gccaagcugucucagug

SEQ ID NO: 3802 - RNA, 17 nt, Homo Sapiens
cugucucagugacaaac

SEQ ID NO: 3803 - RNA, 17 nt, Homo Sapiens
ucucagugacaaaccca

SEQ ID NO: 3804 - RNA, 17 nt, Homo Sapiens
agugacaaacccauacc

SEQ ID NO: 3805 - RNA, 17 nt, Homo Sapiens
acaaacccauacccuug

SEQ ID NO: 3806 - RNA, 17 nt, Homo Sapiens
aaacccauacccuugug

SEQ ID NO: 3807 - RNA, 17 nt, Homo Sapiens
auacccuugugaagaau

SEQ ID NO: 3808 - RNA, 17 nt, Homo Sapiens
ugugaagaauggagaag

SEQ ID NO: 3809 - RNA, 17 nt, Homo Sapiens
auggagaaguguggagg

SEQ ID NO: 3810 - RNA, 17 nt, Homo Sapiens
ggagaaguguggaggac

SEQ ID NO: 3811 - RNA, 17 nt, Homo Sapiens
uguggaggacuuccagg

SEQ ID NO: 3812 - RNA, 17 nt, Homo Sapiens
gggaggaaauaaaauug

SEQ ID NO: 3813 - RNA, 17 nt, Homo Sapiens
gaaauaaaauugaaguu

SEQ ID NO: 3814 - RNA, 17 nt, Homo Sapiens
aaauugaaguuaauaaa

SEQ ID NO: 3815 - RNA, 17 nt, Homo Sapiens
ugaaguuaauaaaaauc

SEQ ID NO: 3816 - RNA, 17 nt, Homo Sapiens
uaauaaaaaucaauuug

SEQ ID NO: 3817 - RNA, 17 nt, Homo Sapiens
aaaaaucaauuugcucu

SEQ ID NO: 3818 - RNA, 17 nt, Homo Sapiens
aucaauuugcucuaauu

SEQ ID NO: 3819 - RNA, 17 nt, Homo Sapiens
uugcucuaauugaagga

SEQ ID NO: 3820 - RNA, 17 nt, Homo Sapiens
aggaaaaaacaaaacug

SEQ ID NO: 3821 - RNA, 17 nt, Homo Sapiens
aaaacaaaacuguaagu

SEQ ID NO: 3822 - RNA, 17 nt, Homo Sapiens
acaaaacuguaaguacc

SEQ ID NO: 3823 - RNA, 17 nt, Homo Sapiens
aacuguaaguacccuug

SEQ ID NO: 3824 - RNA, 17 nt, Homo Sapiens
cuguaaguacccuuguu

SEQ ID NO: 3825 - RNA, 17 nt, Homo Sapiens
guacccuuguuauccaa

SEQ ID NO: 3826 - RNA, 17 nt, Homo Sapiens
cccuuguuauccaagcg

SEQ ID NO: 3827 - RNA, 17 nt, Homo Sapiens
uuauccaagcggcaaau

SEQ ID NO: 3828 - RNA, 17 nt, Homo Sapiens
uccaagcggcaaaugug

SEQ ID NO: 3829 - RNA, 17 nt, Homo Sapiens
agcggcaaaugugucag

SEQ ID NO: 3830 - RNA, 17 nt, Homo Sapiens
cggcaaaugugucagcu

SEQ ID NO: 3831 - RNA, 17 nt, Homo Sapiens
gcaaaugugucagcuuu

SEQ ID NO: 3832 - RNA, 17 nt, Homo Sapiens
augugucagcuuuguac

SEQ ID NO: 3833 - RNA, 17 nt, Homo Sapiens
ucagcuuuguacaaaug

SEQ ID NO: 3834 - RNA, 17 nt, Homo Sapiens
agcuuuguacaaaugug

SEQ ID NO: 3835 - RNA, 17 nt, Homo Sapiens
uuguacaaaugugaagc

SEQ ID NO: 3836 - RNA, 17 nt, Homo Sapiens
guacaaaugugaagcgg

SEQ ID NO: 3837 - RNA, 17 nt, Homo Sapiens
aaugugaagcggucaac

SEQ ID NO: 3838 - RNA, 17 nt, Homo Sapiens
gugaagcggucaacaaa

SEQ ID NO: 3839 - RNA, 17 nt, Homo Sapiens
agcggucaacaaagucg

SEQ ID NO: 3840 - RNA, 17 nt, Homo Sapiens
ucaacaaagucgggaga

SEQ ID NO: 3841 - RNA, 17 nt, Homo Sapiens
gagagagggugaucucc

SEQ ID NO: 3842 - RNA, 17 nt, Homo Sapiens
agagggugaucuccuuc

SEQ ID NO: 3843 - RNA, 17 nt, Homo Sapiens
cuccuuccacgugacca

SEQ ID NO: 3844 - RNA, 17 nt, Homo Sapiens
ccuuccacgugaccagg

SEQ ID NO: 3845 - RNA, 17 nt, Homo Sapiens
uccacgugaccaggggu

SEQ ID NO: 3846 - RNA, 17 nt, Homo Sapiens
gaccagggguccugaaa

SEQ ID NO: 3847 - RNA, 17 nt, Homo Sapiens
guccugaaauuacuuug

SEQ ID NO: 3848 - RNA, 17 nt, Homo Sapiens
cugaaauuacuuugcaa

SEQ ID NO: 3849 - RNA, 17 nt, Homo Sapiens
auuacuuugcaaccuga

SEQ ID NO: 3850 - RNA, 17 nt, Homo Sapiens
acuuugcaaccugacau

SEQ ID NO: 3851 - RNA, 17 nt, Homo Sapiens
gcaaccugacaugcagc

SEQ ID NO: 3852 - RNA, 17 nt, Homo Sapiens
aaccugacaugcagccc

SEQ ID NO: 3853 - RNA, 17 nt, Homo Sapiens
ccugacaugcagcccac

SEQ ID NO: 3854 - RNA, 17 nt, Homo Sapiens
gacaugcagcccacuga

SEQ ID NO: 3855 - RNA, 17 nt, Homo Sapiens
ugcagcccacugagcag

SEQ ID NO: 3856 - RNA, 17 nt, Homo Sapiens
cccacugagcaggagag

SEQ ID NO: 3857 - RNA, 17 nt, Homo Sapiens
gcaggagagcgugucuu

SEQ ID NO: 3858 - RNA, 17 nt, Homo Sapiens
aggagagcgugucuuug

SEQ ID NO: 3859 - RNA, 17 nt, Homo Sapiens
gagagcgugucuuugug

SEQ ID NO: 3860 - RNA, 17 nt, Homo Sapiens
gugucuuuguggugcac

SEQ ID NO: 3861 - RNA, 17 nt, Homo Sapiens
ucuuuguggugcacugc

SEQ ID NO: 3862 - RNA, 17 nt, Homo Sapiens
uuuguggugcacugcag

SEQ ID NO: 3863 - RNA, 17 nt, Homo Sapiens
uguggugcacugcagac

SEQ ID NO: 3864 - RNA, 17 nt, Homo Sapiens
ggugcacugcagacaga

SEQ ID NO: 3865 - RNA, 17 nt, Homo Sapiens
cacugcagacagaucua

SEQ ID NO: 3866 - RNA, 17 nt, Homo Sapiens
gcagacagaucuacguu

SEQ ID NO: 3867 - RNA, 17 nt, Homo Sapiens
acagaucuacguuugag

SEQ ID NO: 3868 - RNA, 17 nt, Homo Sapiens
agaucuacguuugagaa

SEQ ID NO: 3869 - RNA, 17 nt, Homo Sapiens
guuugagaaccucacau

SEQ ID NO: 3870 - RNA, 17 nt, Homo Sapiens
agaaccucacaugguac

SEQ ID NO: 3871 - RNA, 17 nt, Homo Sapiens
aaccucacaugguacaa

SEQ ID NO: 3872 - RNA, 17 nt, Homo Sapiens
cucacaugguacaagcu

SEQ ID NO: 3873 - RNA, 17 nt, Homo Sapiens
cacaugguacaagcuug

SEQ ID NO: 3874 - RNA, 17 nt, Homo Sapiens
ugguacaagcuuggccc

SEQ ID NO: 3875 - RNA, 17 nt, Homo Sapiens
caagcuuggcccacagc

SEQ ID NO: 3876 - RNA, 17 nt, Homo Sapiens
cuuggcccacagccucu

SEQ ID NO: 3877 - RNA, 17 nt, Homo Sapiens
ggcccacagccucugcc

SEQ ID NO: 3878 - RNA, 17 nt, Homo Sapiens
cagccucugccaaucca

SEQ ID NO: 3879 - RNA, 17 nt, Homo Sapiens
cucugccaauccaugug

SEQ ID NO: 3880 - RNA, 17 nt, Homo Sapiens
gccaauccaugugggag

SEQ ID NO: 3881 - RNA, 17 nt, Homo Sapiens
caauccaugugggagag

SEQ ID NO: 3882 - RNA, 17 nt, Homo Sapiens
gugggagaguugcccac

SEQ ID NO: 3883 - RNA, 17 nt, Homo Sapiens
ggagaguugcccacacc

SEQ ID NO: 3884 - RNA, 17 nt, Homo Sapiens
aguugcccacaccuguu

SEQ ID NO: 3885 - RNA, 17 nt, Homo Sapiens
uugcccacaccuguuug

SEQ ID NO: 3886 - RNA, 17 nt, Homo Sapiens
ccacaccuguuugcaag

SEQ ID NO: 3887 - RNA, 17 nt, Homo Sapiens
accuguuugcaagaacu

SEQ ID NO: 3888 - RNA, 17 nt, Homo Sapiens
uugcaagaacuuggaua

SEQ ID NO: 3889 - RNA, 17 nt, Homo Sapiens
gaacuuggauacucuuu

SEQ ID NO: 3890 - RNA, 17 nt, Homo Sapiens
acuuggauacucuuugg

SEQ ID NO: 3891 - RNA, 17 nt, Homo Sapiens
cuuuggaaauugaaugc

SEQ ID NO: 3892 - RNA, 17 nt, Homo Sapiens
gaaauugaaugccacca

SEQ ID NO: 3893 - RNA, 17 nt, Homo Sapiens
aauugaaugccaccaug

SEQ ID NO: 3894 - RNA, 17 nt, Homo Sapiens
ugaaugccaccauguuc

SEQ ID NO: 3895 - RNA, 17 nt, Homo Sapiens
augccaccauguucucu

SEQ ID NO: 3896 - RNA, 17 nt, Homo Sapiens
gccaccauguucucuaa

SEQ ID NO: 3897 - RNA, 17 nt, Homo Sapiens
guucucuaauagcacaa

SEQ ID NO: 3898 - RNA, 17 nt, Homo Sapiens
cucuaauagcacaaaug

SEQ ID NO: 3899 - RNA, 17 nt, Homo Sapiens
cuaauagcacaaaugac

SEQ ID NO: 3900 - RNA, 17 nt, Homo Sapiens
uagcacaaaugacauuu

SEQ ID NO: 3901 - RNA, 17 nt, Homo Sapiens
cacaaaugacauuuuga

SEQ ID NO: 3902 - RNA, 17 nt, Homo Sapiens
caaaugacauuuugauc

SEQ ID NO: 3903 - RNA, 17 nt, Homo Sapiens
acauuuugaucauggag

SEQ ID NO: 3904 - RNA, 17 nt, Homo Sapiens
uuuugaucauggagcuu

SEQ ID NO: 3905 - RNA, 17 nt, Homo Sapiens
aucauggagcuuaagaa

SEQ ID NO: 3906 - RNA, 17 nt, Homo Sapiens
gcuuaagaaugcauccu

SEQ ID NO: 3907 - RNA, 17 nt, Homo Sapiens
uuaagaaugcauccuug

SEQ ID NO: 3908 - RNA, 17 nt, Homo Sapiens
aagaaugcauccuugca

SEQ ID NO: 3909 - RNA, 17 nt, Homo Sapiens
gcauccuugcaggacca

SEQ ID NO: 3910 - RNA, 17 nt, Homo Sapiens
cuugcaggaccaaggag

SEQ ID NO: 3911 - RNA, 17 nt, Homo Sapiens
ccaaggagacuaugucu

SEQ ID NO: 3912 - RNA, 17 nt, Homo Sapiens
aggagacuaugucugcc

SEQ ID NO: 3913 - RNA, 17 nt, Homo Sapiens
gagacuaugucugccuu

SEQ ID NO: 3914 - RNA, 17 nt, Homo Sapiens
cuaugucugccuugcuc

SEQ ID NO: 3915 - RNA, 17 nt, Homo Sapiens
ucugccuugcucaagac

SEQ ID NO: 3916 - RNA, 17 nt, Homo Sapiens
ugcucaagacaggaaga

SEQ ID NO: 3917 - RNA, 17 nt, Homo Sapiens
acaggaagaccaagaaa

SEQ ID NO: 3918 - RNA, 17 nt, Homo Sapiens
aagaaaagacauugcgu

SEQ ID NO: 3919 - RNA, 17 nt, Homo Sapiens
gaaaagacauugcgugg

SEQ ID NO: 3920 - RNA, 17 nt, Homo Sapiens
aagacauugcgugguca

SEQ ID NO: 3921 - RNA, 17 nt, Homo Sapiens
gacauugcguggucagg

SEQ ID NO: 3922 - RNA, 17 nt, Homo Sapiens
auugcguggucaggcag

SEQ ID NO: 3923 - RNA, 17 nt, Homo Sapiens
guggucaggcagcucac

SEQ ID NO: 3924 - RNA, 17 nt, Homo Sapiens
gucaggcagcucacagu

SEQ ID NO: 3925 - RNA, 17 nt, Homo Sapiens
ggcagcucacaguccua

SEQ ID NO: 3926 - RNA, 17 nt, Homo Sapiens
agcucacaguccuagag

SEQ ID NO: 3927 - RNA, 17 nt, Homo Sapiens
guccuagagcguguggc

SEQ ID NO: 3928 - RNA, 17 nt, Homo Sapiens
ccuagagcguguggcac

SEQ ID NO: 3929 - RNA, 17 nt, Homo Sapiens
uagagcguguggcaccc

SEQ ID NO: 3930 - RNA, 17 nt, Homo Sapiens
agcguguggcacccacg

SEQ ID NO: 3931 - RNA, 17 nt, Homo Sapiens
cguguggcacccacgau

SEQ ID NO: 3932 - RNA, 17 nt, Homo Sapiens
uggcacccacgaucaca

SEQ ID NO: 3933 - RNA, 17 nt, Homo Sapiens
cacccacgaucacagga

SEQ ID NO: 3934 - RNA, 17 nt, Homo Sapiens
ccacgaucacaggaaac

SEQ ID NO: 3935 - RNA, 17 nt, Homo Sapiens
cacaggaaaccuggaga

SEQ ID NO: 3936 - RNA, 17 nt, Homo Sapiens
ccuggagaaucagacga

SEQ ID NO: 3937 - RNA, 17 nt, Homo Sapiens
agaaucagacgacaagu

SEQ ID NO: 3938 - RNA, 17 nt, Homo Sapiens
aucagacgacaaguauu

SEQ ID NO: 3939 - RNA, 17 nt, Homo Sapiens
gacgacaaguauugggg

SEQ ID NO: 3940 - RNA, 17 nt, Homo Sapiens
cgacaaguauuggggaa

SEQ ID NO: 3941 - RNA, 17 nt, Homo Sapiens
uggggaaagcaucgaag

SEQ ID NO: 3942 - RNA, 17 nt, Homo Sapiens
gggaaagcaucgaaguc

SEQ ID NO: 3943 - RNA, 17 nt, Homo Sapiens
gcaucgaagucucaugc

SEQ ID NO: 3944 - RNA, 17 nt, Homo Sapiens
gaagucucaugcacggc

SEQ ID NO: 3945 - RNA, 17 nt, Homo Sapiens
agucucaugcacggcau

SEQ ID NO: 3946 - RNA, 17 nt, Homo Sapiens
ucucaugcacggcaucu

SEQ ID NO: 3947 - RNA, 17 nt, Homo Sapiens
caugcacggcaucuggg

SEQ ID NO: 3948 - RNA, 17 nt, Homo Sapiens
ugcacggcaucugggaa

SEQ ID NO: 3949 - RNA, 17 nt, Homo Sapiens
aucugggaaucccccuc

SEQ ID NO: 3950 - RNA, 17 nt, Homo Sapiens
cccccuccacagaucau

SEQ ID NO: 3951 - RNA, 17 nt, Homo Sapiens
cuccacagaucaugugg

SEQ ID NO: 3952 - RNA, 17 nt, Homo Sapiens
cacagaucaugugguuu

SEQ ID NO: 3953 - RNA, 17 nt, Homo Sapiens
cagaucaugugguuuaa

SEQ ID NO: 3954 - RNA, 17 nt, Homo Sapiens
aucaugugguuuaaaga

SEQ ID NO: 3955 - RNA, 17 nt, Homo Sapiens
guuuaaagauaaugaga

SEQ ID NO: 3956 - RNA, 17 nt, Homo Sapiens
uaaagauaaugagaccc

SEQ ID NO: 3957 - RNA, 17 nt, Homo Sapiens
auaaugagacccuugua

SEQ ID NO: 3958 - RNA, 17 nt, Homo Sapiens
agacccuuguagaagac

SEQ ID NO: 3959 - RNA, 17 nt, Homo Sapiens
uguagaagacucaggca

SEQ ID NO: 3960 - RNA, 17 nt, Homo Sapiens
agacucaggcauuguau

SEQ ID NO: 3961 - RNA, 17 nt, Homo Sapiens
acucaggcauuguauug

SEQ ID NO: 3962 - RNA, 17 nt, Homo Sapiens
caggcauuguauugaag

SEQ ID NO: 3963 - RNA, 17 nt, Homo Sapiens
ggcauuguauugaagga

SEQ ID NO: 3964 - RNA, 17 nt, Homo Sapiens
auugaaggaugggaacc

SEQ ID NO: 3965 - RNA, 17 nt, Homo Sapiens
ggaugggaaccggaacc

SEQ ID NO: 3966 - RNA, 17 nt, Homo Sapiens
gaaccggaaccucacua

SEQ ID NO: 3967 - RNA, 17 nt, Homo Sapiens
ggaaccucacuauccgc

SEQ ID NO: 3968 - RNA, 17 nt, Homo Sapiens
accucacuauccgcaga

SEQ ID NO: 3969 - RNA, 17 nt, Homo Sapiens
cacuauccgcagaguga

SEQ ID NO: 3970 - RNA, 17 nt, Homo Sapiens
uccgcagagugaggaag

SEQ ID NO: 3971 - RNA, 17 nt, Homo Sapiens
gaaggaggacgaaggcc

SEQ ID NO: 3972 - RNA, 17 nt, Homo Sapiens
ggacgaaggccucuaca

SEQ ID NO: 3973 - RNA, 17 nt, Homo Sapiens
aggccucuacaccugcc

SEQ ID NO: 3974 - RNA, 17 nt, Homo Sapiens
gccucuacaccugccag

SEQ ID NO: 3975 - RNA, 17 nt, Homo Sapiens
cuacaccugccaggcau

SEQ ID NO: 3976 - RNA, 17 nt, Homo Sapiens
ccugccaggcaugcagu

SEQ ID NO: 3977 - RNA, 17 nt, Homo Sapiens
ugccaggcaugcagugu

SEQ ID NO: 3978 - RNA, 17 nt, Homo Sapiens
ccaggcaugcaguguuc

SEQ ID NO: 3979 - RNA, 17 nt, Homo Sapiens
ggcaugcaguguucuug

SEQ ID NO: 3980 - RNA, 17 nt, Homo Sapiens
caugcaguguucuuggc

SEQ ID NO: 3981 - RNA, 17 nt, Homo Sapiens
uguucuuggcugugcaa

SEQ ID NO: 3982 - RNA, 17 nt, Homo Sapiens
ucuuggcugugcaaaag

SEQ ID NO: 3983 - RNA, 17 nt, Homo Sapiens
uuggcugugcaaaagug

SEQ ID NO: 3984 - RNA, 17 nt, Homo Sapiens
gugcaaaaguggaggca

SEQ ID NO: 3985 - RNA, 17 nt, Homo Sapiens
aaguggaggcauuuuuc

SEQ ID NO: 3986 - RNA, 17 nt, Homo Sapiens
guggaggcauuuuucau

SEQ ID NO: 3987 - RNA, 17 nt, Homo Sapiens
cauuuuucauaauagaa

SEQ ID NO: 3988 - RNA, 17 nt, Homo Sapiens
uuuucauaauagaaggu

SEQ ID NO: 3989 - RNA, 17 nt, Homo Sapiens
aauagaaggugcccagg

SEQ ID NO: 3990 - RNA, 17 nt, Homo Sapiens
uagaaggugcccaggaa

SEQ ID NO: 3991 - RNA, 17 nt, Homo Sapiens
aggaaaagacgaacuug

SEQ ID NO: 3992 - RNA, 17 nt, Homo Sapiens
aaagacgaacuuggaaa

SEQ ID NO: 3993 - RNA, 17 nt, Homo Sapiens
acuuggaaaucauuauu

SEQ ID NO: 3994 - RNA, 17 nt, Homo Sapiens
uggaaaucauuauucua

SEQ ID NO: 3995 - RNA, 17 nt, Homo Sapiens
aaaucauuauucuagua

SEQ ID NO: 3996 - RNA, 17 nt, Homo Sapiens
uuauucuaguaggcacg

SEQ ID NO: 3997 - RNA, 17 nt, Homo Sapiens
ucuaguaggcacggcgg

SEQ ID NO: 3998 - RNA, 17 nt, Homo Sapiens
uaguaggcacggcggug

SEQ ID NO: 3999 - RNA, 17 nt, Homo Sapiens
uaggcacggcggugauu

SEQ ID NO: 4000 - RNA, 17 nt, Homo Sapiens
gcacggcggugauugcc

SEQ ID NO: 4001 - RNA, 17 nt, Homo Sapiens
cggcggugauugccaug

SEQ ID NO: 4002 - RNA, 17 nt, Homo Sapiens
cggugauugccauguuc

SEQ ID NO: 4003 - RNA, 17 nt, Homo Sapiens
ugauugccauguucuuc

SEQ ID NO: 4004 - RNA, 17 nt, Homo Sapiens
auugccauguucuucug

SEQ ID NO: 4005 - RNA, 17 nt, Homo Sapiens
uucuucuggcuacuucu

SEQ ID NO: 4006 - RNA, 17 nt, Homo Sapiens
uucuggcuacuucuugu

SEQ ID NO: 4007 - RNA, 17 nt, Homo Sapiens
uacuucuugucaucauc

SEQ ID NO: 4008 - RNA, 17 nt, Homo Sapiens
uucuugucaucauccua

SEQ ID NO: 4009 - RNA, 17 nt, Homo Sapiens
uugucaucauccuacgg

SEQ ID NO: 4010 - RNA, 17 nt, Homo Sapiens
aucauccuacggaccgu

SEQ ID NO: 4011 - RNA, 17 nt, Homo Sapiens
uccuacggaccguuaag

SEQ ID NO: 4012 - RNA, 17 nt, Homo Sapiens
uacggaccguuaagcgg

SEQ ID NO: 4013 - RNA, 17 nt, Homo Sapiens
accguuaagcgggccaa

SEQ ID NO: 4014 - RNA, 17 nt, Homo Sapiens
uuaagcgggccaaugga

SEQ ID NO: 4015 - RNA, 17 nt, Homo Sapiens
gcgggccaauggagggg

SEQ ID NO: 4016 - RNA, 17 nt, Homo Sapiens
ggaggggaacugaagac

SEQ ID NO: 4017 - RNA, 17 nt, Homo Sapiens
aacugaagacaggcuac

SEQ ID NO: 4018 - RNA, 17 nt, Homo Sapiens
gaagacaggcuacuugu

SEQ ID NO: 4019 - RNA, 17 nt, Homo Sapiens
gacaggcuacuugucca

SEQ ID NO: 4020 - RNA, 17 nt, Homo Sapiens
ggcuacuuguccaucgu

SEQ ID NO: 4021 - RNA, 17 nt, Homo Sapiens
acuuguccaucgucaug

SEQ ID NO: 4022 - RNA, 17 nt, Homo Sapiens
uguccaucgucauggau

SEQ ID NO: 4023 - RNA, 17 nt, Homo Sapiens
ccaucgucauggaucca

SEQ ID NO: 4024 - RNA, 17 nt, Homo Sapiens
cgucauggauccagaug

SEQ ID NO: 4025 - RNA, 17 nt, Homo Sapiens
ggauccagaugaacucc

SEQ ID NO: 4026 - RNA, 17 nt, Homo Sapiens
ccagaugaacucccauu

SEQ ID NO: 4027 - RNA, 17 nt, Homo Sapiens
gaacucccauuggauga

SEQ ID NO: 4028 - RNA, 17 nt, Homo Sapiens
cccauuggaugaacauu

SEQ ID NO: 4029 - RNA, 17 nt, Homo Sapiens
uuggaugaacauuguga

SEQ ID NO: 4030 - RNA, 17 nt, Homo Sapiens
ggaugaacauugugaac

SEQ ID NO: 4031 - RNA, 17 nt, Homo Sapiens
ugaacauugugaacgac

SEQ ID NO: 4032 - RNA, 17 nt, Homo Sapiens
cauugugaacgacugcc

SEQ ID NO: 4033 - RNA, 17 nt, Homo Sapiens
ugugaacgacugccuua

SEQ ID NO: 4034 - RNA, 17 nt, Homo Sapiens
gaacgacugccuuauga

SEQ ID NO: 4035 - RNA, 17 nt, Homo Sapiens
acugccuuaugaugcca

SEQ ID NO: 4036 - RNA, 17 nt, Homo Sapiens
gccuuaugaugccagca

SEQ ID NO: 4037 - RNA, 17 nt, Homo Sapiens
cuuaugaugccagcaaa

SEQ ID NO: 4038 - RNA, 17 nt, Homo Sapiens
ugaugccagcaaauggg

SEQ ID NO: 4039 - RNA, 17 nt, Homo Sapiens
gccagcaaaugggaauu

SEQ ID NO: 4040 - RNA, 17 nt, Homo Sapiens
aaaugggaauuccccag

SEQ ID NO: 4041 - RNA, 17 nt, Homo Sapiens
ccccagagaccggcuga

SEQ ID NO: 4042 - RNA, 17 nt, Homo Sapiens
agagaccggcugaagcu

SEQ ID NO: 4043 - RNA, 17 nt, Homo Sapiens
cggcugaagcuagguaa

SEQ ID NO: 4044 - RNA, 17 nt, Homo Sapiens
gaagcuagguaagccuc

SEQ ID NO: 4045 - RNA, 17 nt, Homo Sapiens
cuagguaagccucuugg

SEQ ID NO: 4046 - RNA, 17 nt, Homo Sapiens
gccucuuggccguggug

SEQ ID NO: 4047 - RNA, 17 nt, Homo Sapiens
ucuuggccguggugccu

SEQ ID NO: 4048 - RNA, 17 nt, Homo Sapiens
uggccguggugccuuug

SEQ ID NO: 4049 - RNA, 17 nt, Homo Sapiens
gccguggugccuuuggc

SEQ ID NO: 4050 - RNA, 17 nt, Homo Sapiens
ugccuuuggccaaguga

SEQ ID NO: 4051 - RNA, 17 nt, Homo Sapiens
uuggccaagugauugaa

SEQ ID NO: 4052 - RNA, 17 nt, Homo Sapiens
gccaagugauugaagca

SEQ ID NO: 4053 - RNA, 17 nt, Homo Sapiens
ugauugaagcagaugcc

SEQ ID NO: 4054 - RNA, 17 nt, Homo Sapiens
ugaagcagaugccuuug

SEQ ID NO: 4055 - RNA, 17 nt, Homo Sapiens
aagcagaugccuuugga

SEQ ID NO: 4056 - RNA, 17 nt, Homo Sapiens
ccuuuggaauugacaag

SEQ ID NO: 4057 - RNA, 17 nt, Homo Sapiens
uggaauugacaagacag

SEQ ID NO: 4058 - RNA, 17 nt, Homo Sapiens
uugacaagacagcaacu

SEQ ID NO: 4059 - RNA, 17 nt, Homo Sapiens
acaagacagcaacuugc

SEQ ID NO: 4060 - RNA, 17 nt, Homo Sapiens
agacagcaacuugcagg

SEQ ID NO: 4061 - RNA, 17 nt, Homo Sapiens
agcaacuugcaggacag

SEQ ID NO: 4062 - RNA, 17 nt, Homo Sapiens
cuugcaggacaguagca

SEQ ID NO: 4063 - RNA, 17 nt, Homo Sapiens
gcaggacaguagcaguc

SEQ ID NO: 4064 - RNA, 17 nt, Homo Sapiens
ggacaguagcagucaaa

SEQ ID NO: 4065 - RNA, 17 nt, Homo Sapiens
caguagcagucaaaaug

SEQ ID NO: 4066 - RNA, 17 nt, Homo Sapiens
cagucaaaauguugaaa

SEQ ID NO: 4067 - RNA, 17 nt, Homo Sapiens
gucaaaauguugaaaga

SEQ ID NO: 4068 - RNA, 17 nt, Homo Sapiens
aagaaggagcaacacac

SEQ ID NO: 4069 - RNA, 17 nt, Homo Sapiens
aaggagcaacacacagu

SEQ ID NO: 4070 - RNA, 17 nt, Homo Sapiens
ggagcaacacacaguga

SEQ ID NO: 4071 - RNA, 17 nt, Homo Sapiens
agcaacacacagugagc

SEQ ID NO: 4072 - RNA, 17 nt, Homo Sapiens
aacacacagugagcauc

SEQ ID NO: 4073 - RNA, 17 nt, Homo Sapiens
cacagugagcaucgagc

SEQ ID NO: 4074 - RNA, 17 nt, Homo Sapiens
cagugagcaucgagcuc

SEQ ID NO: 4075 - RNA, 17 nt, Homo Sapiens
agcaucgagcucucaug

SEQ ID NO: 4076 - RNA, 17 nt, Homo Sapiens
gagcucucaugucugaa

SEQ ID NO: 4077 - RNA, 17 nt, Homo Sapiens
gcucucaugucugaacu

SEQ ID NO: 4078 - RNA, 17 nt, Homo Sapiens
augucugaacucaagau

SEQ ID NO: 4079 - RNA, 17 nt, Homo Sapiens
aacucaagauccucauu

SEQ ID NO: 4080 - RNA, 17 nt, Homo Sapiens
agauccucauucauauu

SEQ ID NO: 4081 - RNA, 17 nt, Homo Sapiens
ccucauucauauugguc

SEQ ID NO: 4082 - RNA, 17 nt, Homo Sapiens
ucauucauauuggucac

SEQ ID NO: 4083 - RNA, 17 nt, Homo Sapiens
ucauauuggucaccauc

SEQ ID NO: 4084 - RNA, 17 nt, Homo Sapiens
uauuggucaccaucuca

SEQ ID NO: 4085 - RNA, 17 nt, Homo Sapiens
uggucaccaucucaaug

SEQ ID NO: 4086 - RNA, 17 nt, Homo Sapiens
ccaucucaaugugguca

SEQ ID NO: 4087 - RNA, 17 nt, Homo Sapiens
aucucaauguggucaac

SEQ ID NO: 4088 - RNA, 17 nt, Homo Sapiens
ucaauguggucaaccuu

SEQ ID NO: 4089 - RNA, 17 nt, Homo Sapiens
uguggucaaccuucuag

SEQ ID NO: 4090 - RNA, 17 nt, Homo Sapiens
ccuucuaggugccugua

SEQ ID NO: 4091 - RNA, 17 nt, Homo Sapiens
uucuaggugccuguacc

SEQ ID NO: 4092 - RNA, 17 nt, Homo Sapiens
aggugccuguaccaagc

SEQ ID NO: 4093 - RNA, 17 nt, Homo Sapiens
gugccuguaccaagcca

SEQ ID NO: 4094 - RNA, 17 nt, Homo Sapiens
uguaccaagccaggagg

SEQ ID NO: 4095 - RNA, 17 nt, Homo Sapiens
ccaggagggccacucau

SEQ ID NO: 4096 - RNA, 17 nt, Homo Sapiens
ggagggccacucauggu

SEQ ID NO: 4097 - RNA, 17 nt, Homo Sapiens
ggccacucauggugauu

SEQ ID NO: 4098 - RNA, 17 nt, Homo Sapiens
cacucauggugauugug

SEQ ID NO: 4099 - RNA, 17 nt, Homo Sapiens
ucauggugauuguggaa

SEQ ID NO: 4100 - RNA, 17 nt, Homo Sapiens
uggugauuguggaauuc

SEQ ID NO: 4101 - RNA, 17 nt, Homo Sapiens
auuguggaauucugcaa

SEQ ID NO: 4102 - RNA, 17 nt, Homo Sapiens
ggaauucugcaaauuug

SEQ ID NO: 4103 - RNA, 17 nt, Homo Sapiens
uucugcaaauuuggaaa

SEQ ID NO: 4104 - RNA, 17 nt, Homo Sapiens
auuuggaaaccugucca

SEQ ID NO: 4105 - RNA, 17 nt, Homo Sapiens
ggaaaccuguccacuua

SEQ ID NO: 4106 - RNA, 17 nt, Homo Sapiens
accuguccacuuaccug

SEQ ID NO: 4107 - RNA, 17 nt, Homo Sapiens
guccacuuaccugagga

SEQ ID NO: 4108 - RNA, 17 nt, Homo Sapiens
ccugaggagcaagagaa

SEQ ID NO: 4109 - RNA, 17 nt, Homo Sapiens
caagagaaaugaauuug

SEQ ID NO: 4110 - RNA, 17 nt, Homo Sapiens
agaaaugaauuuguccc

SEQ ID NO: 4111 - RNA, 17 nt, Homo Sapiens
augaauuuguccccuac

SEQ ID NO: 4112 - RNA, 17 nt, Homo Sapiens
uguccccuacaagacca

SEQ ID NO: 4113 - RNA, 17 nt, Homo Sapiens
ccuacaagaccaaaggg

SEQ ID NO: 4114 - RNA, 17 nt, Homo Sapiens
ccaaaggggcacgauuc

SEQ ID NO: 4115 - RNA, 17 nt, Homo Sapiens
aaaggggcacgauuccg

SEQ ID NO: 4116 - RNA, 17 nt, Homo Sapiens
ggggcacgauuccguca

SEQ ID NO: 4117 - RNA, 17 nt, Homo Sapiens
acgauuccgucaaggga

SEQ ID NO: 4118 - RNA, 17 nt, Homo Sapiens
agggaaagacuacguug

SEQ ID NO: 4119 - RNA, 17 nt, Homo Sapiens
gaaagacuacguuggag

SEQ ID NO: 4120 - RNA, 17 nt, Homo Sapiens
aagacuacguuggagca

SEQ ID NO: 4121 - RNA, 17 nt, Homo Sapiens
acguuggagcaaucccu

SEQ ID NO: 4122 - RNA, 17 nt, Homo Sapiens
uuggagcaaucccugug

SEQ ID NO: 4123 - RNA, 17 nt, Homo Sapiens
caaucccuguggaucug

SEQ ID NO: 4124 - RNA, 17 nt, Homo Sapiens
cccuguggaucugaaac

SEQ ID NO: 4125 - RNA, 17 nt, Homo Sapiens
gaucugaaacggcgcuu

SEQ ID NO: 4126 - RNA, 17 nt, Homo Sapiens
cugaaacggcgcuugga

SEQ ID NO: 4127 - RNA, 17 nt, Homo Sapiens
gaaacggcgcuuggaca

SEQ ID NO: 4128 - RNA, 17 nt, Homo Sapiens
gcgcuuggacagcauca

SEQ ID NO: 4129 - RNA, 17 nt, Homo Sapiens
cuuggacagcaucacca

SEQ ID NO: 4130 - RNA, 17 nt, Homo Sapiens
uggacagcaucaccagu

SEQ ID NO: 4131 - RNA, 17 nt, Homo Sapiens
acagcaucaccaguagc

SEQ ID NO: 4132 - RNA, 17 nt, Homo Sapiens
caucaccaguagccaga

SEQ ID NO: 4133 - RNA, 17 nt, Homo Sapiens
caccaguagccagagcu

SEQ ID NO: 4134 - RNA, 17 nt, Homo Sapiens
uagccagagcucagcca

SEQ ID NO: 4135 - RNA, 17 nt, Homo Sapiens
agagcucagccagcucu

SEQ ID NO: 4136 - RNA, 17 nt, Homo Sapiens
cucagccagcucuggau

SEQ ID NO: 4137 - RNA, 17 nt, Homo Sapiens
agcucuggauuugugga

SEQ ID NO: 4138 - RNA, 17 nt, Homo Sapiens
cuggauuuguggaggag

SEQ ID NO: 4139 - RNA, 17 nt, Homo Sapiens
gaggagaagucccucag

SEQ ID NO: 4140 - RNA, 17 nt, Homo Sapiens
gucccucagugauguag

SEQ ID NO: 4141 - RNA, 17 nt, Homo Sapiens
ccucagugauguagaag

SEQ ID NO: 4142 - RNA, 17 nt, Homo Sapiens
ucagugauguagaagaa

SEQ ID NO: 4143 - RNA, 17 nt, Homo Sapiens
aagaggaagcuccugaa

SEQ ID NO: 4144 - RNA, 17 nt, Homo Sapiens
uccugaagaucuguaua

SEQ ID NO: 4145 - RNA, 17 nt, Homo Sapiens
gaagaucuguauaagga

SEQ ID NO: 4146 - RNA, 17 nt, Homo Sapiens
agaucuguauaaggacu

SEQ ID NO: 4147 - RNA, 17 nt, Homo Sapiens
guauaaggacuuccuga

SEQ ID NO: 4148 - RNA, 17 nt, Homo Sapiens
acuuccugaccuuggag

SEQ ID NO: 4149 - RNA, 17 nt, Homo Sapiens
accuuggagcaucucau

SEQ ID NO: 4150 - RNA, 17 nt, Homo Sapiens
cuuggagcaucucaucu

SEQ ID NO: 4151 - RNA, 17 nt, Homo Sapiens
agcaucucaucuguuac

SEQ ID NO: 4152 - RNA, 17 nt, Homo Sapiens
ucucaucuguuacagcu

SEQ ID NO: 4153 - RNA, 17 nt, Homo Sapiens
caucuguuacagcuucc

SEQ ID NO: 4154 - RNA, 17 nt, Homo Sapiens
cuguuacagcuuccaag

SEQ ID NO: 4155 - RNA, 17 nt, Homo Sapiens
gcuuccaaguggcuaag

SEQ ID NO: 4156 - RNA, 17 nt, Homo Sapiens
uccaaguggcuaagggc

SEQ ID NO: 4157 - RNA, 17 nt, Homo Sapiens
ggcuaagggcauggagu

SEQ ID NO: 4158 - RNA, 17 nt, Homo Sapiens
cuaagggcauggaguuc

SEQ ID NO: 4159 - RNA, 17 nt, Homo Sapiens
ggcauggaguucuuggc

SEQ ID NO: 4160 - RNA, 17 nt, Homo Sapiens
aguucuuggcaucgcga

SEQ ID NO: 4161 - RNA, 17 nt, Homo Sapiens
uucuuggcaucgcgaaa

SEQ ID NO: 4162 - RNA, 17 nt, Homo Sapiens
uuggcaucgcgaaagug

SEQ ID NO: 4163 - RNA, 17 nt, Homo Sapiens
ucgcgaaaguguaucca

SEQ ID NO: 4164 - RNA, 17 nt, Homo Sapiens
gcgaaaguguauccaca

SEQ ID NO: 4165 - RNA, 17 nt, Homo Sapiens
gaaaguguauccacagg

SEQ ID NO: 4166 - RNA, 17 nt, Homo Sapiens
guguauccacagggacc

SEQ ID NO: 4167 - RNA, 17 nt, Homo Sapiens
ccacagggaccuggcgg

SEQ ID NO: 4168 - RNA, 17 nt, Homo Sapiens
gggaccuggcggcacga

SEQ ID NO: 4169 - RNA, 17 nt, Homo Sapiens
accuggcggcacgaaau

SEQ ID NO: 4170 - RNA, 17 nt, Homo Sapiens
cuggcggcacgaaauau

SEQ ID NO: 4171 - RNA, 17 nt, Homo Sapiens
ggcacgaaauauccucu

SEQ ID NO: 4172 - RNA, 17 nt, Homo Sapiens
cacgaaauauccucuua

SEQ ID NO: 4173 - RNA, 17 nt, Homo Sapiens
auccucuuaucggagaa

SEQ ID NO: 4174 - RNA, 17 nt, Homo Sapiens
ggagaagaacgugguua

SEQ ID NO: 4175 - RNA, 17 nt, Homo Sapiens
agaagaacgugguuaaa

SEQ ID NO: 4176 - RNA, 17 nt, Homo Sapiens
agaacgugguuaaaauc

SEQ ID NO: 4177 - RNA, 17 nt, Homo Sapiens
ugguuaaaaucugugac

SEQ ID NO: 4178 - RNA, 17 nt, Homo Sapiens
uaaaaucugugacuuug

SEQ ID NO: 4179 - RNA, 17 nt, Homo Sapiens
aaucugugacuuuggcu

SEQ ID NO: 4180 - RNA, 17 nt, Homo Sapiens
ugacuuuggcuuggccc

SEQ ID NO: 4181 - RNA, 17 nt, Homo Sapiens
uuggcuuggcccgggau

SEQ ID NO: 4182 - RNA, 17 nt, Homo Sapiens
ggcccgggauauuuaua

SEQ ID NO: 4183 - RNA, 17 nt, Homo Sapiens
cccgggauauuuauaaa

SEQ ID NO: 4184 - RNA, 17 nt, Homo Sapiens
ggauauuuauaaagauc

SEQ ID NO: 4185 - RNA, 17 nt, Homo Sapiens
uuauaaagauccagauu

SEQ ID NO: 4186 - RNA, 17 nt, Homo Sapiens
agauccagauuauguca

SEQ ID NO: 4187 - RNA, 17 nt, Homo Sapiens
uccagauuaugucagaa

SEQ ID NO: 4188 - RNA, 17 nt, Homo Sapiens
cagauuaugucagaaaa

SEQ ID NO: 4189 - RNA, 17 nt, Homo Sapiens
aaaaggagaugcucgcc

SEQ ID NO: 4190 - RNA, 17 nt, Homo Sapiens
aaggagaugcucgccuc

SEQ ID NO: 4191 - RNA, 17 nt, Homo Sapiens
agaugcucgccucccuu

SEQ ID NO: 4192 - RNA, 17 nt, Homo Sapiens
ccuuugaaauggauggc

SEQ ID NO: 4193 - RNA, 17 nt, Homo Sapiens
ugaaauggauggcccca

SEQ ID NO: 4194 - RNA, 17 nt, Homo Sapiens
aauggauggccccagaa

SEQ ID NO: 4195 - RNA, 17 nt, Homo Sapiens
ccccagaaacaauuuuu

SEQ ID NO: 4196 - RNA, 17 nt, Homo Sapiens
cagaaacaauuuuugac

SEQ ID NO: 4197 - RNA, 17 nt, Homo Sapiens
aauuuuugacagagugu

SEQ ID NO: 4198 - RNA, 17 nt, Homo Sapiens
uugacagaguguacaca

SEQ ID NO: 4199 - RNA, 17 nt, Homo Sapiens
gacagaguguacacaau

SEQ ID NO: 4200 - RNA, 17 nt, Homo Sapiens
cagaguguacacaaucc

SEQ ID NO: 4201 - RNA, 17 nt, Homo Sapiens
gaguguacacaauccag

SEQ ID NO: 4202 - RNA, 17 nt, Homo Sapiens
uguacacaauccagagu

SEQ ID NO: 4203 - RNA, 17 nt, Homo Sapiens
aauccagagugacgucu

SEQ ID NO: 4204 - RNA, 17 nt, Homo Sapiens
ccagagugacgucuggu

SEQ ID NO: 4205 - RNA, 17 nt, Homo Sapiens
agagugacgucuggucu

SEQ ID NO: 4206 - RNA, 17 nt, Homo Sapiens
gacgucuggucuuuugg

SEQ ID NO: 4207 - RNA, 17 nt, Homo Sapiens
gucuuuugguguuuugc

SEQ ID NO: 4208 - RNA, 17 nt, Homo Sapiens
cuuuugguguuuugcug

SEQ ID NO: 4209 - RNA, 17 nt, Homo Sapiens
gguguuuugcuguggga

SEQ ID NO: 4210 - RNA, 17 nt, Homo Sapiens
guuuugcugugggaaau

SEQ ID NO: 4211 - RNA, 17 nt, Homo Sapiens
ugugggaaauauuuucc

SEQ ID NO: 4212 - RNA, 17 nt, Homo Sapiens
ugggaaauauuuuccuu

SEQ ID NO: 4213 - RNA, 17 nt, Homo Sapiens
uuccuuaggugcuucuc

SEQ ID NO: 4214 - RNA, 17 nt, Homo Sapiens
ccuuaggugcuucucca

SEQ ID NO: 4215 - RNA, 17 nt, Homo Sapiens
gcuucuccauauccugg

SEQ ID NO: 4216 - RNA, 17 nt, Homo Sapiens
uucuccauauccugggg

SEQ ID NO: 4217 - RNA, 17 nt, Homo Sapiens
auccugggguaaagauu

SEQ ID NO: 4218 - RNA, 17 nt, Homo Sapiens
ggguaaagauugaugaa

SEQ ID NO: 4219 - RNA, 17 nt, Homo Sapiens
aaagauugaugaagaau

SEQ ID NO: 4220 - RNA, 17 nt, Homo Sapiens
gaugaagaauuuuguag

SEQ ID NO: 4221 - RNA, 17 nt, Homo Sapiens
agaauuuuguaggcgau

SEQ ID NO: 4222 - RNA, 17 nt, Homo Sapiens
uuuuguaggcgauugaa

SEQ ID NO: 4223 - RNA, 17 nt, Homo Sapiens
uguaggcgauugaaaga

SEQ ID NO: 4224 - RNA, 17 nt, Homo Sapiens
aagaaggaacuagaaug

SEQ ID NO: 4225 - RNA, 17 nt, Homo Sapiens
gaacuagaaugagggcc

SEQ ID NO: 4226 - RNA, 17 nt, Homo Sapiens
gaaugagggccccugau

SEQ ID NO: 4227 - RNA, 17 nt, Homo Sapiens
ggccccugauuauacua

SEQ ID NO: 4228 - RNA, 17 nt, Homo Sapiens
cccugauuauacuacac

SEQ ID NO: 4229 - RNA, 17 nt, Homo Sapiens
cugauuauacuacacca

SEQ ID NO: 4230 - RNA, 17 nt, Homo Sapiens
auuauacuacaccagaa

SEQ ID NO: 4231 - RNA, 17 nt, Homo Sapiens
uauacuacaccagaaau

SEQ ID NO: 4232 - RNA, 17 nt, Homo Sapiens
caccagaaauguaccag

SEQ ID NO: 4233 - RNA, 17 nt, Homo Sapiens
ccagaaauguaccagac

SEQ ID NO: 4234 - RNA, 17 nt, Homo Sapiens
agaaauguaccagacca

SEQ ID NO: 4235 - RNA, 17 nt, Homo Sapiens
uguaccagaccaugcug

SEQ ID NO: 4236 - RNA, 17 nt, Homo Sapiens
accagaccaugcuggac

SEQ ID NO: 4237 - RNA, 17 nt, Homo Sapiens
cagaccaugcuggacug

SEQ ID NO: 4238 - RNA, 17 nt, Homo Sapiens
caugcuggacugcuggc

SEQ ID NO: 4239 - RNA, 17 nt, Homo Sapiens
gcuggacugcuggcacg

SEQ ID NO: 4240 - RNA, 17 nt, Homo Sapiens
gacugcuggcacgggga

SEQ ID NO: 4241 - RNA, 17 nt, Homo Sapiens
cugcuggcacggggagc

SEQ ID NO: 4242 - RNA, 17 nt, Homo Sapiens
cacggggagcccaguca

SEQ ID NO: 4243 - RNA, 17 nt, Homo Sapiens
ggagcccagucagagac

SEQ ID NO: 4244 - RNA, 17 nt, Homo Sapiens
agucagagacccacguu

SEQ ID NO: 4245 - RNA, 17 nt, Homo Sapiens
agagacccacguuuuca

SEQ ID NO: 4246 - RNA, 17 nt, Homo Sapiens
agacccacguuuucaga

SEQ ID NO: 4247 - RNA, 17 nt, Homo Sapiens
uuuucagaguuggugga

SEQ ID NO: 4248 - RNA, 17 nt, Homo Sapiens
cagaguugguggaacau

SEQ ID NO: 4249 - RNA, 17 nt, Homo Sapiens
uugguggaacauuuggg

SEQ ID NO: 4250 - RNA, 17 nt, Homo Sapiens
gguggaacauuugggaa

SEQ ID NO: 4251 - RNA, 17 nt, Homo Sapiens
uuugggaaaucucuugc

SEQ ID NO: 4252 - RNA, 17 nt, Homo Sapiens
aaucucuugcaagcuaa

SEQ ID NO: 4253 - RNA, 17 nt, Homo Sapiens
ucuugcaagcuaaugcu

SEQ ID NO: 4254 - RNA, 17 nt, Homo Sapiens
gcaagcuaaugcucagc

SEQ ID NO: 4255 - RNA, 17 nt, Homo Sapiens
aagcuaaugcucagcag

SEQ ID NO: 4256 - RNA, 17 nt, Homo Sapiens
aaugcucagcaggaugg

SEQ ID NO: 4257 - RNA, 17 nt, Homo Sapiens
ucagcaggauggcaaag

SEQ ID NO: 4258 - RNA, 17 nt, Homo Sapiens
gcaggauggcaaagacu

SEQ ID NO: 4259 - RNA, 17 nt, Homo Sapiens
uggcaaagacuacauug

SEQ ID NO: 4260 - RNA, 17 nt, Homo Sapiens
caaagacuacauuguuc

SEQ ID NO: 4261 - RNA, 17 nt, Homo Sapiens
aagacuacauuguucuu

SEQ ID NO: 4262 - RNA, 17 nt, Homo Sapiens
acuacauuguucuuccg

SEQ ID NO: 4263 - RNA, 17 nt, Homo Sapiens
uucuuccgauaucagag

SEQ ID NO: 4264 - RNA, 17 nt, Homo Sapiens
cuuccgauaucagagac

SEQ ID NO: 4265 - RNA, 17 nt, Homo Sapiens
uaucagagacuuugagc

SEQ ID NO: 4266 - RNA, 17 nt, Homo Sapiens
gacuuugagcauggaag

SEQ ID NO: 4267 - RNA, 17 nt, Homo Sapiens
cuuugagcauggaagag

SEQ ID NO: 4268 - RNA, 17 nt, Homo Sapiens
ggaagaggauucuggac

SEQ ID NO: 4269 - RNA, 17 nt, Homo Sapiens
gauucuggacucucucu

SEQ ID NO: 4270 - RNA, 17 nt, Homo Sapiens
cucucucugccuaccuc

SEQ ID NO: 4271 - RNA, 17 nt, Homo Sapiens
cucugccuaccucaccu

SEQ ID NO: 4272 - RNA, 17 nt, Homo Sapiens
ccuaccucaccuguuuc

SEQ ID NO: 4273 - RNA, 17 nt, Homo Sapiens
ccucaccuguuuccugu

SEQ ID NO: 4274 - RNA, 17 nt, Homo Sapiens
uguuuccuguauggagg

SEQ ID NO: 4275 - RNA, 17 nt, Homo Sapiens
uuuccuguauggaggag

SEQ ID NO: 4276 - RNA, 17 nt, Homo Sapiens
aggaggaaguaugugac

SEQ ID NO: 4277 - RNA, 17 nt, Homo Sapiens
gaggaaguaugugaccc

SEQ ID NO: 4278 - RNA, 17 nt, Homo Sapiens
ggaaguaugugacccca

SEQ ID NO: 4279 - RNA, 17 nt, Homo Sapiens
aguaugugaccccaaau

SEQ ID NO: 4280 - RNA, 17 nt, Homo Sapiens
gaccccaaauuccauua

SEQ ID NO: 4281 - RNA, 17 nt, Homo Sapiens
caaauuccauuaugaca

SEQ ID NO: 4282 - RNA, 17 nt, Homo Sapiens
auuccauuaugacaaca

SEQ ID NO: 4283 - RNA, 17 nt, Homo Sapiens
ccauuaugacaacacag

SEQ ID NO: 4284 - RNA, 17 nt, Homo Sapiens
uuaugacaacacagcag

SEQ ID NO: 4285 - RNA, 17 nt, Homo Sapiens
augacaacacagcagga

SEQ ID NO: 4286 - RNA, 17 nt, Homo Sapiens
acaacacagcaggaauc

SEQ ID NO: 4287 - RNA, 17 nt, Homo Sapiens
cagcaggaaucagucag

SEQ ID NO: 4288 - RNA, 17 nt, Homo Sapiens
aggaaucagucaguauc

SEQ ID NO: 4289 - RNA, 17 nt, Homo Sapiens
aucagucaguaucugca

SEQ ID NO: 4290 - RNA, 17 nt, Homo Sapiens
cagucaguaucugcaga

SEQ ID NO: 4291 - RNA, 17 nt, Homo Sapiens
caguaucugcagaacag

SEQ ID NO: 4292 - RNA, 17 nt, Homo Sapiens
ucugcagaacaguaagc

SEQ ID NO: 4293 - RNA, 17 nt, Homo Sapiens
gcagaacaguaagcgaa

SEQ ID NO: 4294 - RNA, 17 nt, Homo Sapiens
aacaguaagcgaaagag

SEQ ID NO: 4295 - RNA, 17 nt, Homo Sapiens
gcgaaagagccggccug

SEQ ID NO: 4296 - RNA, 17 nt, Homo Sapiens
aagagccggccugugag

SEQ ID NO: 4297 - RNA, 17 nt, Homo Sapiens
gccggccugugagugua

SEQ ID NO: 4298 - RNA, 17 nt, Homo Sapiens
gccugugaguguaaaaa

SEQ ID NO: 4299 - RNA, 17 nt, Homo Sapiens
cugugaguguaaaaaca

SEQ ID NO: 4300 - RNA, 17 nt, Homo Sapiens
guguaaaaacauuugaa

SEQ ID NO: 4301 - RNA, 17 nt, Homo Sapiens
guaaaaacauuugaaga

SEQ ID NO: 4302 - RNA, 17 nt, Homo Sapiens
auuugaagauaucccgu

SEQ ID NO: 4303 - RNA, 17 nt, Homo Sapiens
uugaagauaucccguua

SEQ ID NO: 4304 - RNA, 17 nt, Homo Sapiens
gauaucccguuagaaga

SEQ ID NO: 4305 - RNA, 17 nt, Homo Sapiens
uuagaagaaccagaagu

SEQ ID NO: 4306 - RNA, 17 nt, Homo Sapiens
aaccagaaguaaaagua

SEQ ID NO: 4307 - RNA, 17 nt, Homo Sapiens
aaguaaaaguaauccca

SEQ ID NO: 4308 - RNA, 17 nt, Homo Sapiens
uaaaaguaaucccagau

SEQ ID NO: 4309 - RNA, 17 nt, Homo Sapiens
aaucccagaugacaacc

SEQ ID NO: 4310 - RNA, 17 nt, Homo Sapiens
cccagaugacaaccaga

SEQ ID NO: 4311 - RNA, 17 nt, Homo Sapiens
agaugacaaccagacgg

SEQ ID NO: 4312 - RNA, 17 nt, Homo Sapiens
acaaccagacggacagu

SEQ ID NO: 4313 - RNA, 17 nt, Homo Sapiens
ccagacggacaguggua

SEQ ID NO: 4314 - RNA, 17 nt, Homo Sapiens
gacggacagugguaugg

SEQ ID NO: 4315 - RNA, 17 nt, Homo Sapiens
ggacagugguaugguuc

SEQ ID NO: 4316 - RNA, 17 nt, Homo Sapiens
acagugguaugguucuu

SEQ ID NO: 4317 - RNA, 17 nt, Homo Sapiens
gugguaugguucuugcc

SEQ ID NO: 4318 - RNA, 17 nt, Homo Sapiens
ugguucuugccucagaa

SEQ ID NO: 4319 - RNA, 17 nt, Homo Sapiens
ucagaagagcugaaaac

SEQ ID NO: 4320 - RNA, 17 nt, Homo Sapiens
agcugaaaacuuuggaa

SEQ ID NO: 4321 - RNA, 17 nt, Homo Sapiens
uuuggaagacagaacca

SEQ ID NO: 4322 - RNA, 17 nt, Homo Sapiens
aagacagaaccaaauua

SEQ ID NO: 4323 - RNA, 17 nt, Homo Sapiens
agaaccaaauuaucucc

SEQ ID NO: 4324 - RNA, 17 nt, Homo Sapiens
accaaauuaucuccauc

SEQ ID NO: 4325 - RNA, 17 nt, Homo Sapiens
uuaucuccaucuuuugg

SEQ ID NO: 4326 - RNA, 17 nt, Homo Sapiens
aucuuuugguggaaugg

SEQ ID NO: 4327 - RNA, 17 nt, Homo Sapiens
uugguggaauggugccc

SEQ ID NO: 4328 - RNA, 17 nt, Homo Sapiens
guggaauggugcccagc

SEQ ID NO: 4329 - RNA, 17 nt, Homo Sapiens
ggaauggugcccagcaa

SEQ ID NO: 4330 - RNA, 17 nt, Homo Sapiens
ggugcccagcaaaagca

SEQ ID NO: 4331 - RNA, 17 nt, Homo Sapiens
cagcaaaagcagggagu

SEQ ID NO: 4332 - RNA, 17 nt, Homo Sapiens
agcagggagucuguggc

SEQ ID NO: 4333 - RNA, 17 nt, Homo Sapiens
gggagucuguggcaucu

SEQ ID NO: 4334 - RNA, 17 nt, Homo Sapiens
agucuguggcaucugaa

SEQ ID NO: 4335 - RNA, 17 nt, Homo Sapiens
ucuguggcaucugaagg

SEQ ID NO: 4336 - RNA, 17 nt, Homo Sapiens
aucugaaggcucaaacc

SEQ ID NO: 4337 - RNA, 17 nt, Homo Sapiens
aggcucaaaccagacaa

SEQ ID NO: 4338 - RNA, 17 nt, Homo Sapiens
caaaccagacaagcggc

SEQ ID NO: 4339 - RNA, 17 nt, Homo Sapiens
ccagacaagcggcuacc

SEQ ID NO: 4340 - RNA, 17 nt, Homo Sapiens
gacaagcggcuaccagu

SEQ ID NO: 4341 - RNA, 17 nt, Homo Sapiens
aagcggcuaccaguccg

SEQ ID NO: 4342 - RNA, 17 nt, Homo Sapiens
ggcuaccaguccggaua

SEQ ID NO: 4343 - RNA, 17 nt, Homo Sapiens
caguccggauaucacuc

SEQ ID NO: 4344 - RNA, 17 nt, Homo Sapiens
guccggauaucacuccg

SEQ ID NO: 4345 - RNA, 17 nt, Homo Sapiens
cggauaucacuccgaug

SEQ ID NO: 4346 - RNA, 17 nt, Homo Sapiens
ucacuccgaugacacag

SEQ ID NO: 4347 - RNA, 17 nt, Homo Sapiens
cuccgaugacacagaca

SEQ ID NO: 4348 - RNA, 17 nt, Homo Sapiens
ccgaugacacagacacc

SEQ ID NO: 4349 - RNA, 17 nt, Homo Sapiens
ugacacagacaccaccg

SEQ ID NO: 4350 - RNA, 17 nt, Homo Sapiens
acacagacaccaccgug

SEQ ID NO: 4351 - RNA, 17 nt, Homo Sapiens
cagacaccaccguguac

SEQ ID NO: 4352 - RNA, 17 nt, Homo Sapiens
acaccaccguguacucc

SEQ ID NO: 4353 - RNA, 17 nt, Homo Sapiens
accaccguguacuccag

SEQ ID NO: 4354 - RNA, 17 nt, Homo Sapiens
caccguguacuccagug

SEQ ID NO: 4355 - RNA, 17 nt, Homo Sapiens
guacuccagugaggaag

SEQ ID NO: 4356 - RNA, 17 nt, Homo Sapiens
gugaggaagcagaacuu

SEQ ID NO: 4357 - RNA, 17 nt, Homo Sapiens
gaagcagaacuuuuaaa

SEQ ID NO: 4358 - RNA, 17 nt, Homo Sapiens
cuuuuaaagcugauaga

SEQ ID NO: 4359 - RNA, 17 nt, Homo Sapiens
uaaagcugauagagauu

SEQ ID NO: 4360 - RNA, 17 nt, Homo Sapiens
ugauagagauuggagug

SEQ ID NO: 4361 - RNA, 17 nt, Homo Sapiens
agauuggagugcaaacc

SEQ ID NO: 4362 - RNA, 17 nt, Homo Sapiens
auuggagugcaaaccgg

SEQ ID NO: 4363 - RNA, 17 nt, Homo Sapiens
gagugcaaaccgguagc

SEQ ID NO: 4364 - RNA, 17 nt, Homo Sapiens
gcaaaccgguagcacag

SEQ ID NO: 4365 - RNA, 17 nt, Homo Sapiens
aaccgguagcacagccc

SEQ ID NO: 4366 - RNA, 17 nt, Homo Sapiens
ccgguagcacagcccag

SEQ ID NO: 4367 - RNA, 17 nt, Homo Sapiens
guagcacagcccagauu

SEQ ID NO: 4368 - RNA, 17 nt, Homo Sapiens
cagcccagauucuccag

SEQ ID NO: 4369 - RNA, 17 nt, Homo Sapiens
auucuccagccugacuc

SEQ ID NO: 4370 - RNA, 17 nt, Homo Sapiens
ccagccugacucgggga

SEQ ID NO: 4371 - RNA, 17 nt, Homo Sapiens
acucggggaccacacug

SEQ ID NO: 4372 - RNA, 17 nt, Homo Sapiens
cggggaccacacugagc

SEQ ID NO: 4373 - RNA, 17 nt, Homo Sapiens
gggaccacacugagcuc

SEQ ID NO: 4374 - RNA, 17 nt, Homo Sapiens
cacacugagcucuccuc

SEQ ID NO: 4375 - RNA, 17 nt, Homo Sapiens
cuccuccuguuuaaaag

SEQ ID NO: 4376 - RNA, 17 nt, Homo Sapiens
aaaaggaagcauccaca

SEQ ID NO: 4377 - RNA, 17 nt, Homo Sapiens
aaggaagcauccacacc

SEQ ID NO: 4378 - RNA, 17 nt, Homo Sapiens
aagcauccacaccccaa

SEQ ID NO: 4379 - RNA, 17 nt, Homo Sapiens
gcauccacaccccaacu

SEQ ID NO: 4380 - RNA, 17 nt, Homo Sapiens
acaccccaacucccgga

SEQ ID NO: 4381 - RNA, 17 nt, Homo Sapiens
acucccggacaucacau

SEQ ID NO: 4382 - RNA, 17 nt, Homo Sapiens
ucccggacaucacauga

SEQ ID NO: 4383 - RNA, 17 nt, Homo Sapiens
cggacaucacaugagag

SEQ ID NO: 4384 - RNA, 17 nt, Homo Sapiens
gacaucacaugagaggu

SEQ ID NO: 4385 - RNA, 17 nt, Homo Sapiens
caugagaggucugcuca

SEQ ID NO: 4386 - RNA, 17 nt, Homo Sapiens
agaggucugcucagauu

SEQ ID NO: 4387 - RNA, 17 nt, Homo Sapiens
cugcucagauuuugaag

SEQ ID NO: 4388 - RNA, 17 nt, Homo Sapiens
auuuugaaguguuguuc

SEQ ID NO: 4389 - RNA, 17 nt, Homo Sapiens
uuugaaguguuguucuu

SEQ ID NO: 4390 - RNA, 17 nt, Homo Sapiens
gaaguguuguucuuucc

SEQ ID NO: 4391 - RNA, 17 nt, Homo Sapiens
uucuuuccaccagcagg

SEQ ID NO: 4392 - RNA, 17 nt, Homo Sapiens
uuccaccagcaggaagu

SEQ ID NO: 4393 - RNA, 17 nt, Homo Sapiens
agcaggaaguagccgca

SEQ ID NO: 4394 - RNA, 17 nt, Homo Sapiens
aggaaguagccgcauuu

SEQ ID NO: 4395 - RNA, 17 nt, Homo Sapiens
aaguagccgcauuugau

SEQ ID NO: 4396 - RNA, 17 nt, Homo Sapiens
guagccgcauuugauuu

SEQ ID NO: 4397 - RNA, 17 nt, Homo Sapiens
cgcauuugauuuucauu

SEQ ID NO: 4398 - RNA, 17 nt, Homo Sapiens
ugauuuucauuucgaca

SEQ ID NO: 4399 - RNA, 17 nt, Homo Sapiens
ucauuucgacaacagaa

SEQ ID NO: 4400 - RNA, 17 nt, Homo Sapiens
uuucgacaacagaaaaa

SEQ ID NO: 4401 - RNA, 17 nt, Homo Sapiens
gaaaaaggaccucggac

SEQ ID NO: 4402 - RNA, 17 nt, Homo Sapiens
gaccucggacugcaggg

SEQ ID NO: 4403 - RNA, 17 nt, Homo Sapiens
cucggacugcagggagc

SEQ ID NO: 4404 - RNA, 17 nt, Homo Sapiens
ugcagggagccagucuu

SEQ ID NO: 4405 - RNA, 17 nt, Homo Sapiens
gggagccagucuucuag

SEQ ID NO: 4406 - RNA, 17 nt, Homo Sapiens
ucuucuaggcauauccu

SEQ ID NO: 4407 - RNA, 17 nt, Homo Sapiens
uucuaggcauauccugg

SEQ ID NO: 4408 - RNA, 17 nt, Homo Sapiens
cuaggcauauccuggaa

SEQ ID NO: 4409 - RNA, 17 nt, Homo Sapiens
uggaagaggcuugugac

SEQ ID NO: 4410 - RNA, 17 nt, Homo Sapiens
agaggcuugugacccaa

SEQ ID NO: 4411 - RNA, 17 nt, Homo Sapiens
ggcuugugacccaagaa

SEQ ID NO: 4412 - RNA, 17 nt, Homo Sapiens
acccaagaaugugucug

SEQ ID NO: 4413 - RNA, 17 nt, Homo Sapiens
ccaagaaugugucugug

SEQ ID NO: 4414 - RNA, 17 nt, Homo Sapiens
aagaaugugucuguguc

SEQ ID NO: 4415 - RNA, 17 nt, Homo Sapiens
augugucugugucuucu

SEQ ID NO: 4416 - RNA, 17 nt, Homo Sapiens
gugucugugucuucucc

SEQ ID NO: 4417 - RNA, 17 nt, Homo Sapiens
uucucccaguguugacc

SEQ ID NO: 4418 - RNA, 17 nt, Homo Sapiens
cucccaguguugaccug

SEQ ID NO: 4419 - RNA, 17 nt, Homo Sapiens
caguguugaccugaucc

SEQ ID NO: 4420 - RNA, 17 nt, Homo Sapiens
uugaccugauccucuuu

SEQ ID NO: 4421 - RNA, 17 nt, Homo Sapiens
cuuuuuucauucauuua

SEQ ID NO: 4422 - RNA, 17 nt, Homo Sapiens
uuucauucauuuaaaaa

SEQ ID NO: 4423 - RNA, 17 nt, Homo Sapiens
uuuaaaaagcauuauca

SEQ ID NO: 4424 - RNA, 17 nt, Homo Sapiens
uaaaaagcauuaucaug

SEQ ID NO: 4425 - RNA, 17 nt, Homo Sapiens
aaagcauuaucaugccc

SEQ ID NO: 4426 - RNA, 17 nt, Homo Sapiens
gcauuaucaugccccug

SEQ ID NO: 4427 - RNA, 17 nt, Homo Sapiens
auuaucaugccccugcu

SEQ ID NO: 4428 - RNA, 17 nt, Homo Sapiens
augccccugcugcgggu

SEQ ID NO: 4429 - RNA, 17 nt, Homo Sapiens
ccccugcugcgggucuc

SEQ ID NO: 4430 - RNA, 17 nt, Homo Sapiens
ugcugcgggucucacca

SEQ ID NO: 4431 - RNA, 17 nt, Homo Sapiens
cgggucucaccaugggu

SEQ ID NO: 4432 - RNA, 17 nt, Homo Sapiens
gucucaccauggguuua

SEQ ID NO: 4433 - RNA, 17 nt, Homo Sapiens
caccauggguuuagaac

SEQ ID NO: 4434 - RNA, 17 nt, Homo Sapiens
gguuuagaacaaagagc

SEQ ID NO: 4435 - RNA, 17 nt, Homo Sapiens
aacaaagagcuucaagc

SEQ ID NO: 4436 - RNA, 17 nt, Homo Sapiens
agcuucaagcaauggcc

SEQ ID NO: 4437 - RNA, 17 nt, Homo Sapiens
uucaagcaauggcccca

SEQ ID NO: 4438 - RNA, 17 nt, Homo Sapiens
aagcaauggccccaucc

SEQ ID NO: 4439 - RNA, 17 nt, Homo Sapiens
auggccccauccucaaa

SEQ ID NO: 4440 - RNA, 17 nt, Homo Sapiens
ucaaagaaguagcagua

SEQ ID NO: 4441 - RNA, 17 nt, Homo Sapiens
aagaaguagcaguaccu

SEQ ID NO: 4442 - RNA, 17 nt, Homo Sapiens
aaguagcaguaccuggg

SEQ ID NO: 4443 - RNA, 17 nt, Homo Sapiens
guagcaguaccugggga

SEQ ID NO: 4444 - RNA, 17 nt, Homo Sapiens
ccuggggagcugacacu

SEQ ID NO: 4445 - RNA, 17 nt, Homo Sapiens
gggagcugacacuucug

SEQ ID NO: 4446 - RNA, 17 nt, Homo Sapiens
gagcugacacuucugua

SEQ ID NO: 4447 - RNA, 17 nt, Homo Sapiens
acacuucuguaaaacua

SEQ ID NO: 4448 - RNA, 17 nt, Homo Sapiens
ucuguaaaacuagaaga

SEQ ID NO: 4449 - RNA, 17 nt, Homo Sapiens
acuagaagauaaaccag

SEQ ID NO: 4450 - RNA, 17 nt, Homo Sapiens
gaagauaaaccaggcaa

SEQ ID NO: 4451 - RNA, 17 nt, Homo Sapiens
uaaaccaggcaacguaa

SEQ ID NO: 4452 - RNA, 17 nt, Homo Sapiens
accaggcaacguaagug

SEQ ID NO: 4453 - RNA, 17 nt, Homo Sapiens
caggcaacguaaguguu

SEQ ID NO: 4454 - RNA, 17 nt, Homo Sapiens
caacguaaguguucgag

SEQ ID NO: 4455 - RNA, 17 nt, Homo Sapiens
acguaaguguucgaggu

SEQ ID NO: 4456 - RNA, 17 nt, Homo Sapiens
uguucgagguguugaag

SEQ ID NO: 4457 - RNA, 17 nt, Homo Sapiens
uucgagguguugaagau

SEQ ID NO: 4458 - RNA, 17 nt, Homo Sapiens
uguugaagaugggaagg

SEQ ID NO: 4459 - RNA, 17 nt, Homo Sapiens
ugggaaggauuugcagg

SEQ ID NO: 4460 - RNA, 17 nt, Homo Sapiens
aaggauuugcagggcug

SEQ ID NO: 4461 - RNA, 17 nt, Homo Sapiens
uuugcagggcugagucu

SEQ ID NO: 4462 - RNA, 17 nt, Homo Sapiens
agggcugagucuaucca

SEQ ID NO: 4463 - RNA, 17 nt, Homo Sapiens
cugagucuauccaagag

SEQ ID NO: 4464 - RNA, 17 nt, Homo Sapiens
uccaagaggcuuuguuu

SEQ ID NO: 4465 - RNA, 17 nt, Homo Sapiens
gaggcuuuguuuaggac

SEQ ID NO: 4466 - RNA, 17 nt, Homo Sapiens
uguuuaggacguggguc

SEQ ID NO: 4467 - RNA, 17 nt, Homo Sapiens
uuuaggacguggguccc

SEQ ID NO: 4468 - RNA, 17 nt, Homo Sapiens
ggacgugggucccaagc

SEQ ID NO: 4469 - RNA, 17 nt, Homo Sapiens
ggucccaagccaagccu

SEQ ID NO: 4470 - RNA, 17 nt, Homo Sapiens
caagccaagccuuaagu

SEQ ID NO: 4471 - RNA, 17 nt, Homo Sapiens
agccuuaaguguggaau

SEQ ID NO: 4472 - RNA, 17 nt, Homo Sapiens
ccuuaaguguggaauuc

SEQ ID NO: 4473 - RNA, 17 nt, Homo Sapiens
aguguggaauucggauu

SEQ ID NO: 4474 - RNA, 17 nt, Homo Sapiens
gaauucggauugauaga

SEQ ID NO: 4475 - RNA, 17 nt, Homo Sapiens
ucggauugauagaaagg

SEQ ID NO: 4476 - RNA, 17 nt, Homo Sapiens
aaaggaagacuaacguu

SEQ ID NO: 4477 - RNA, 17 nt, Homo Sapiens
gaagacuaacguuaccu

SEQ ID NO: 4478 - RNA, 17 nt, Homo Sapiens
agacuaacguuaccuug

SEQ ID NO: 4479 - RNA, 17 nt, Homo Sapiens
cuaacguuaccuugcuu

SEQ ID NO: 4480 - RNA, 17 nt, Homo Sapiens
guuaccuugcuuuggag

SEQ ID NO: 4481 - RNA, 17 nt, Homo Sapiens
uuuggagaguacuggag

SEQ ID NO: 4482 - RNA, 17 nt, Homo Sapiens
uggagaguacuggagcc

SEQ ID NO: 4483 - RNA, 17 nt, Homo Sapiens
guacuggagccugcaaa

SEQ ID NO: 4484 - RNA, 17 nt, Homo Sapiens
uggagccugcaaaugca

SEQ ID NO: 4485 - RNA, 17 nt, Homo Sapiens
gccugcaaaugcauugu

SEQ ID NO: 4486 - RNA, 17 nt, Homo Sapiens
cugcaaaugcauugugu

SEQ ID NO: 4487 - RNA, 17 nt, Homo Sapiens
gcaaaugcauuguguuu

SEQ ID NO: 4488 - RNA, 17 nt, Homo Sapiens
aaugcauuguguuugcu

SEQ ID NO: 4489 - RNA, 17 nt, Homo Sapiens
ugcauuguguuugcucu

SEQ ID NO: 4490 - RNA, 17 nt, Homo Sapiens
uuguguuugcucuggug

SEQ ID NO: 4491 - RNA, 17 nt, Homo Sapiens
uugcucugguggaggug

SEQ ID NO: 4492 - RNA, 17 nt, Homo Sapiens
ugguggaggugggcaug

SEQ ID NO: 4493 - RNA, 17 nt, Homo Sapiens
ggaggugggcauggggu

SEQ ID NO: 4494 - RNA, 17 nt, Homo Sapiens
aggugggcauggggucu

SEQ ID NO: 4495 - RNA, 17 nt, Homo Sapiens
ggcauggggucuguucu

SEQ ID NO: 4496 - RNA, 17 nt, Homo Sapiens
uggggucuguucugaaa

SEQ ID NO: 4497 - RNA, 17 nt, Homo Sapiens
guucugaaauguaaagg

SEQ ID NO: 4498 - RNA, 17 nt, Homo Sapiens
ucugaaauguaaagggu

SEQ ID NO: 4499 - RNA, 17 nt, Homo Sapiens
uguaaaggguucagacg

SEQ ID NO: 4500 - RNA, 17 nt, Homo Sapiens
ggguucagacgggguuu

SEQ ID NO: 4501 - RNA, 17 nt, Homo Sapiens
cagacgggguuucuggu

SEQ ID NO: 4502 - RNA, 17 nt, Homo Sapiens
gguuucugguuuuagaa

SEQ ID NO: 4503 - RNA, 17 nt, Homo Sapiens
uuuagaagguugcgugu

SEQ ID NO: 4504 - RNA, 17 nt, Homo Sapiens
agaagguugcguguucu

SEQ ID NO: 4505 - RNA, 17 nt, Homo Sapiens
aagguugcguguucuuc

SEQ ID NO: 4506 - RNA, 17 nt, Homo Sapiens
gguugcguguucuucga

SEQ ID NO: 4507 - RNA, 17 nt, Homo Sapiens
uucuucgaguugggcua

SEQ ID NO: 4508 - RNA, 17 nt, Homo Sapiens
cgaguugggcuaaagua

SEQ ID NO: 4509 - RNA, 17 nt, Homo Sapiens
gggcuaaaguagaguuc

SEQ ID NO: 4510 - RNA, 17 nt, Homo Sapiens
aaaguagaguucguugu

SEQ ID NO: 4511 - RNA, 17 nt, Homo Sapiens
uagaguucguugugcug

SEQ ID NO: 4512 - RNA, 17 nt, Homo Sapiens
aguucguugugcuguuu

SEQ ID NO: 4513 - RNA, 17 nt, Homo Sapiens
uucguugugcuguuucu

SEQ ID NO: 4514 - RNA, 17 nt, Homo Sapiens
guugugcuguuucugac

SEQ ID NO: 4515 - RNA, 17 nt, Homo Sapiens
uguuucugacuccuaau

SEQ ID NO: 4516 - RNA, 17 nt, Homo Sapiens
gacuccuaaugagaguu

SEQ ID NO: 4517 - RNA, 17 nt, Homo Sapiens
uaaugagaguuccuucc

SEQ ID NO: 4518 - RNA, 17 nt, Homo Sapiens
ccuuccagaccguuagc

SEQ ID NO: 4519 - RNA, 17 nt, Homo Sapiens
uccagaccguuagcugu

SEQ ID NO: 4520 - RNA, 17 nt, Homo Sapiens
gaccguuagcugucucc

SEQ ID NO: 4521 - RNA, 17 nt, Homo Sapiens
cguuagcugucuccuug

SEQ ID NO: 4522 - RNA, 17 nt, Homo Sapiens
gucuccuugccaagccc

SEQ ID NO: 4523 - RNA, 17 nt, Homo Sapiens
cuugccaagccccagga

SEQ ID NO: 4524 - RNA, 17 nt, Homo Sapiens
ggaagaaaaugaugcag

SEQ ID NO: 4525 - RNA, 17 nt, Homo Sapiens
agaaaaugaugcagcuc

SEQ ID NO: 4526 - RNA, 17 nt, Homo Sapiens
aaaaugaugcagcucug

SEQ ID NO: 4527 - RNA, 17 nt, Homo Sapiens
augaugcagcucuggcu

SEQ ID NO: 4528 - RNA, 17 nt, Homo Sapiens
cagcucuggcuccuugu

SEQ ID NO: 4529 - RNA, 17 nt, Homo Sapiens
ggcuccuugucucccag

SEQ ID NO: 4530 - RNA, 17 nt, Homo Sapiens
ucucccaggcugauccu

SEQ ID NO: 4531 - RNA, 17 nt, Homo Sapiens
ccaggcugauccuuuau

SEQ ID NO: 4532 - RNA, 17 nt, Homo Sapiens
gauccuuuauucagaau

SEQ ID NO: 4533 - RNA, 17 nt, Homo Sapiens
uauucagaauaccacaa

SEQ ID NO: 4534 - RNA, 17 nt, Homo Sapiens
uucagaauaccacaaag

SEQ ID NO: 4535 - RNA, 17 nt, Homo Sapiens
agaauaccacaaagaaa

SEQ ID NO: 4536 - RNA, 17 nt, Homo Sapiens
aagaaaggacauucagc

SEQ ID NO: 4537 - RNA, 17 nt, Homo Sapiens
gaaaggacauucagcuc

SEQ ID NO: 4538 - RNA, 17 nt, Homo Sapiens
gacauucagcucaaggc

SEQ ID NO: 4539 - RNA, 17 nt, Homo Sapiens
agcucaaggcucccugc

SEQ ID NO: 4540 - RNA, 17 nt, Homo Sapiens
ggcucccugccguguug

SEQ ID NO: 4541 - RNA, 17 nt, Homo Sapiens
ucccugccguguugaag

SEQ ID NO: 4542 - RNA, 17 nt, Homo Sapiens
ccugccguguugaagag

SEQ ID NO: 4543 - RNA, 17 nt, Homo Sapiens
guugaagaguucugacu

SEQ ID NO: 4544 - RNA, 17 nt, Homo Sapiens
gaguucugacugcacaa

SEQ ID NO: 4545 - RNA, 17 nt, Homo Sapiens
uucugacugcacaaacc

SEQ ID NO: 4546 - RNA, 17 nt, Homo Sapiens
cugacugcacaaaccag

SEQ ID NO: 4547 - RNA, 17 nt, Homo Sapiens
cugcacaaaccagcuuc

SEQ ID NO: 4548 - RNA, 17 nt, Homo Sapiens
acaaaccagcuucuggu

SEQ ID NO: 4549 - RNA, 17 nt, Homo Sapiens
agcuucugguuucuucu

SEQ ID NO: 4550 - RNA, 17 nt, Homo Sapiens
cuucuggaaugaauacc

SEQ ID NO: 4551 - RNA, 17 nt, Homo Sapiens
uggaaugaauacccuca

SEQ ID NO: 4552 - RNA, 17 nt, Homo Sapiens
gaaugaauacccucaua

SEQ ID NO: 4553 - RNA, 17 nt, Homo Sapiens
auacccucauaucuguc

SEQ ID NO: 4554 - RNA, 17 nt, Homo Sapiens
acccucauaucuguccu

SEQ ID NO: 4555 - RNA, 17 nt, Homo Sapiens
ucauaucuguccugaug

SEQ ID NO: 4556 - RNA, 17 nt, Homo Sapiens
cuguccugaugugauau

SEQ ID NO: 4557 - RNA, 17 nt, Homo Sapiens
guccugaugugauaugu

SEQ ID NO: 4558 - RNA, 17 nt, Homo Sapiens
cugaugugauaugucug

SEQ ID NO: 4559 - RNA, 17 nt, Homo Sapiens
gaugugauaugucugag

SEQ ID NO: 4560 - RNA, 17 nt, Homo Sapiens
ugugauaugucugagac

SEQ ID NO: 4561 - RNA, 17 nt, Homo Sapiens
ugucugagacugaaugc

SEQ ID NO: 4562 - RNA, 17 nt, Homo Sapiens
gagacugaaugcgggag

SEQ ID NO: 4563 - RNA, 17 nt, Homo Sapiens
gacugaaugcgggaggu

SEQ ID NO: 4564 - RNA, 17 nt, Homo Sapiens
ugcgggagguucaaugu

SEQ ID NO: 4565 - RNA, 17 nt, Homo Sapiens
gagguucaaugugaagc

SEQ ID NO: 4566 - RNA, 17 nt, Homo Sapiens
gguucaaugugaagcug

SEQ ID NO: 4567 - RNA, 17 nt, Homo Sapiens
aaugugaagcugugugu

SEQ ID NO: 4568 - RNA, 17 nt, Homo Sapiens
gugaagcuguguguggu

SEQ ID NO: 4569 - RNA, 17 nt, Homo Sapiens
gaagcuguguguggugu

SEQ ID NO: 4570 - RNA, 17 nt, Homo Sapiens
agcugugugugguguca

SEQ ID NO: 4571 - RNA, 17 nt, Homo Sapiens
uguguguggugucaaag

SEQ ID NO: 4572 - RNA, 17 nt, Homo Sapiens
uguguggugucaaaguu

SEQ ID NO: 4573 - RNA, 17 nt, Homo Sapiens
gugucaaaguuucagga

SEQ ID NO: 4574 - RNA, 17 nt, Homo Sapiens
caggaaggauuuuaccc

SEQ ID NO: 4575 - RNA, 17 nt, Homo Sapiens
aggauuuuacccuuuug

SEQ ID NO: 4576 - RNA, 17 nt, Homo Sapiens
acccuuuuguucuuccc

SEQ ID NO: 4577 - RNA, 17 nt, Homo Sapiens
uucccccuguccccaac

SEQ ID NO: 4578 - RNA, 17 nt, Homo Sapiens
uguccccaacccacucu

SEQ ID NO: 4579 - RNA, 17 nt, Homo Sapiens
cccaacccacucucacc

SEQ ID NO: 4580 - RNA, 17 nt, Homo Sapiens
ccacucucaccccgcaa

SEQ ID NO: 4581 - RNA, 17 nt, Homo Sapiens
cucaccccgcaacccau

SEQ ID NO: 4582 - RNA, 17 nt, Homo Sapiens
accccgcaacccaucag

SEQ ID NO: 4583 - RNA, 17 nt, Homo Sapiens
cgcaacccaucaguauu

SEQ ID NO: 4584 - RNA, 17 nt, Homo Sapiens
acccaucaguauuuuag

SEQ ID NO: 4585 - RNA, 17 nt, Homo Sapiens
ccaucaguauuuuaguu

SEQ ID NO: 4586 - RNA, 17 nt, Homo Sapiens
guauuuuaguuauuugg

SEQ ID NO: 4587 - RNA, 17 nt, Homo Sapiens
uuuuaguuauuuggccu

SEQ ID NO: 4588 - RNA, 17 nt, Homo Sapiens
guuauuuggccucuacu

SEQ ID NO: 4589 - RNA, 17 nt, Homo Sapiens
uggccucuacuccagua

SEQ ID NO: 4590 - RNA, 17 nt, Homo Sapiens
cuacuccaguaaaccug

SEQ ID NO: 4591 - RNA, 17 nt, Homo Sapiens
uccaguaaaccugauug

SEQ ID NO: 4592 - RNA, 17 nt, Homo Sapiens
uaaaccugauuggguuu

SEQ ID NO: 4593 - RNA, 17 nt, Homo Sapiens
cugauuggguuuguuca

SEQ ID NO: 4594 - RNA, 17 nt, Homo Sapiens
uuggguuuguucacucu

SEQ ID NO: 4595 - RNA, 17 nt, Homo Sapiens
guuuguucacucucuga

SEQ ID NO: 4596 - RNA, 17 nt, Homo Sapiens
cucucugaaugauuauu

SEQ ID NO: 4597 - RNA, 17 nt, Homo Sapiens
ucugaaugauuauuagc

SEQ ID NO: 4598 - RNA, 17 nt, Homo Sapiens
gaaugauuauuagccag

SEQ ID NO: 4599 - RNA, 17 nt, Homo Sapiens
gauuauuagccagacuu

SEQ ID NO: 4600 - RNA, 17 nt, Homo Sapiens
uuagccagacuucaaaa

SEQ ID NO: 4601 - RNA, 17 nt, Homo Sapiens
acuucaaaauuauuuua

SEQ ID NO: 4602 - RNA, 17 nt, Homo Sapiens
ucaaaauuauuuuauag

SEQ ID NO: 4603 - RNA, 17 nt, Homo Sapiens
auuauuuuauagcccaa

SEQ ID NO: 4604 - RNA, 17 nt, Homo Sapiens
auuuuauagcccaaauu

SEQ ID NO: 4605 - RNA, 17 nt, Homo Sapiens
uagcccaaauuauaaca

SEQ ID NO: 4606 - RNA, 17 nt, Homo Sapiens
cccaaauuauaacaucu

SEQ ID NO: 4607 - RNA, 17 nt, Homo Sapiens
aaauuauaacaucuauu

SEQ ID NO: 4608 - RNA, 17 nt, Homo Sapiens
auuauaacaucuauugu

SEQ ID NO: 4609 - RNA, 17 nt, Homo Sapiens
uaacaucuauuguauua

SEQ ID NO: 4610 - RNA, 17 nt, Homo Sapiens
caucuauuguauuauuu

SEQ ID NO: 4611 - RNA, 17 nt, Homo Sapiens
ucuauuguauuauuuag

SEQ ID NO: 4612 - RNA, 17 nt, Homo Sapiens
auuguauuauuuagacu

SEQ ID NO: 4613 - RNA, 17 nt, Homo Sapiens
uuauuuagacuuuuaac

SEQ ID NO: 4614 - RNA, 17 nt, Homo Sapiens
gacuuuuaacauauaga

SEQ ID NO: 4615 - RNA, 17 nt, Homo Sapiens
cuuuuaacauauagagc

SEQ ID NO: 4616 - RNA, 17 nt, Homo Sapiens
uuuaacauauagagcua

SEQ ID NO: 4617 - RNA, 17 nt, Homo Sapiens
cauauagagcuauuucu

SEQ ID NO: 4618 - RNA, 17 nt, Homo Sapiens
auagagcuauuucuacu

SEQ ID NO: 4619 - RNA, 17 nt, Homo Sapiens
cuauuucuacugauuuu

SEQ ID NO: 4620 - RNA, 17 nt, Homo Sapiens
uucuacugauuuuugcc

SEQ ID NO: 4621 - RNA, 17 nt, Homo Sapiens
ugauuuuugcccuuguu

SEQ ID NO: 4622 - RNA, 17 nt, Homo Sapiens
uugcccuuguucugucc

SEQ ID NO: 4623 - RNA, 17 nt, Homo Sapiens
cuuguucuguccuuuuu

SEQ ID NO: 4624 - RNA, 17 nt, Homo Sapiens
aaaagaaaauguguuuu

SEQ ID NO: 4625 - RNA, 17 nt, Homo Sapiens
aagaaaauguguuuuuu

SEQ ID NO: 4626 - RNA, 17 nt, Homo Sapiens
gaaaauguguuuuuugu

SEQ ID NO: 4627 - RNA, 17 nt, Homo Sapiens
uguuuuuuguuugguac

SEQ ID NO: 4628 - RNA, 17 nt, Homo Sapiens
uuuguuugguaccauag

SEQ ID NO: 4629 - RNA, 17 nt, Homo Sapiens
uguuugguaccauagug

SEQ ID NO: 4630 - RNA, 17 nt, Homo Sapiens
uugguaccauaguguga

SEQ ID NO: 4631 - RNA, 17 nt, Homo Sapiens
guaccauagugugaaau

SEQ ID NO: 4632 - RNA, 17 nt, Homo Sapiens
accauagugugaaaugc

SEQ ID NO: 4633 - RNA, 17 nt, Homo Sapiens
agugugaaaugcuggga

SEQ ID NO: 4634 - RNA, 17 nt, Homo Sapiens
ugugaaaugcugggaac

SEQ ID NO: 4635 - RNA, 17 nt, Homo Sapiens
ugcugggaacaaugacu

SEQ ID NO: 4636 - RNA, 17 nt, Homo Sapiens
ugggaacaaugacuaua

SEQ ID NO: 4637 - RNA, 17 nt, Homo Sapiens
gaacaaugacuauaaga

SEQ ID NO: 4638 - RNA, 17 nt, Homo Sapiens
caaugacuauaagacau

SEQ ID NO: 4639 - RNA, 17 nt, Homo Sapiens
acuauaagacaugcuau

SEQ ID NO: 4640 - RNA, 17 nt, Homo Sapiens
uauaagacaugcuaugg

SEQ ID NO: 4641 - RNA, 17 nt, Homo Sapiens
uaagacaugcuauggca

SEQ ID NO: 4642 - RNA, 17 nt, Homo Sapiens
gacaugcuauggcacau

SEQ ID NO: 4643 - RNA, 17 nt, Homo Sapiens
augcuauggcacauaua

SEQ ID NO: 4644 - RNA, 17 nt, Homo Sapiens
gcuauggcacauauauu

SEQ ID NO: 4645 - RNA, 17 nt, Homo Sapiens
uauggcacauauauuua

SEQ ID NO: 4646 - RNA, 17 nt, Homo Sapiens
uggcacauauauuuaua

SEQ ID NO: 4647 - RNA, 17 nt, Homo Sapiens
gcacauauauuuauagu

SEQ ID NO: 4648 - RNA, 17 nt, Homo Sapiens
auauauuuauagucugu

SEQ ID NO: 4649 - RNA, 17 nt, Homo Sapiens
uauuuauagucuguuua

SEQ ID NO: 4650 - RNA, 17 nt, Homo Sapiens
uauagucuguuuaugua

SEQ ID NO: 4651 - RNA, 17 nt, Homo Sapiens
gucuguuuauguagaaa

SEQ ID NO: 4652 - RNA, 17 nt, Homo Sapiens
cuguuuauguagaaaca

SEQ ID NO: 4653 - RNA, 17 nt, Homo Sapiens
auguagaaacaaaugua

SEQ ID NO: 4654 - RNA, 17 nt, Homo Sapiens
agaaacaaauguaauau

SEQ ID NO: 4655 - RNA, 17 nt, Homo Sapiens
aaacaaauguaauauau

SEQ ID NO: 4656 - RNA, 17 nt, Homo Sapiens
caaauguaauauauuaa

SEQ ID NO: 4657 - RNA, 17 nt, Homo Sapiens
aauguaauauauuaaag

SEQ ID NO: 4658 - RNA, 17 nt, Homo Sapiens
uguaauauauuaaagcc

SEQ ID NO: 4659 - RNA, 17 nt, Homo Sapiens
auauuaaagccuuauau

SEQ ID NO: 4660 - RNA, 17 nt, Homo Sapiens
aaagccuuauauauaau

SEQ ID NO: 4661 - RNA, 17 nt, Homo Sapiens
agccuuauauauaauga

SEQ ID NO: 4662 - RNA, 17 nt, Homo Sapiens
ccuuauauauaaugaac

SEQ ID NO: 4663 - RNA, 17 nt, Homo Sapiens
uauauauaaugaacuuu

SEQ ID NO: 4664 - RNA, 17 nt, Homo Sapiens
uauaaugaacuuuguac

SEQ ID NO: 4665 - RNA, 17 nt, Homo Sapiens
ugaacuuuguacuauuc

SEQ ID NO: 4666 - RNA, 17 nt, Homo Sapiens
aacuuuguacuauucac

SEQ ID NO: 4667 - RNA, 17 nt, Homo Sapiens
uuuguacuauucacauu

SEQ ID NO: 4668 - RNA, 17 nt, Homo Sapiens
uacuauucacauuuugu

SEQ ID NO: 4669 - RNA, 17 nt, Homo Sapiens
cuauucacauuuuguau

SEQ ID NO: 4670 - RNA, 17 nt, Homo Sapiens
cacauuuuguaucagua

SEQ ID NO: 4671 - RNA, 17 nt, Homo Sapiens
cauuuuguaucaguauu

SEQ ID NO: 4672 - RNA, 17 nt, Homo Sapiens
uuguaucaguauuaugu

SEQ ID NO: 4673 - RNA, 17 nt, Homo Sapiens
guaucaguauuauguag

SEQ ID NO: 4674 - RNA, 17 nt, Homo Sapiens
ucaguauuauguagcau

SEQ ID NO: 4675 - RNA, 17 nt, Homo Sapiens
aguauuauguagcauaa

SEQ ID NO: 4676 - RNA, 17 nt, Homo Sapiens
auuauguagcauaacaa

SEQ ID NO: 4677 - RNA, 17 nt, Homo Sapiens
uauguagcauaacaaag

SEQ ID NO: 4678 - RNA, 17 nt, Homo Sapiens
guagcauaacaaagguc

SEQ ID NO: 4679 - RNA, 17 nt, Homo Sapiens
uaacaaaggucauaaug

SEQ ID NO: 4680 - RNA, 17 nt, Homo Sapiens
caaaggucauaaugcuu

SEQ ID NO: 4681 - RNA, 17 nt, Homo Sapiens
aggucauaaugcuuuca

SEQ ID NO: 4682 - RNA, 17 nt, Homo Sapiens
gucauaaugcuuucagc

SEQ ID NO: 4683 - RNA, 17 nt, Homo Sapiens
ugcuuucagcaauugau

SEQ ID NO: 4684 - RNA, 17 nt, Homo Sapiens
uuucagcaauugauguc

SEQ ID NO: 4685 - RNA, 17 nt, Homo Sapiens
agcaauugaugucauuu

SEQ ID NO: 4686 - RNA, 17 nt, Homo Sapiens
caauugaugucauuuua

SEQ ID NO: 4687 - RNA, 17 nt, Homo Sapiens
uugaugucauuuuauua

SEQ ID NO: 4688 - RNA, 17 nt, Homo Sapiens
gucauuuuauuaaagaa

SEQ ID NO: 4689 - RNA, 17 nt, Homo Sapiens
auuaaagaacauugaaa

SEQ ID NO: 4690 - RNA, 17 nt, Homo Sapiens
uaaagaacauugaaaaa

SEQ ID NO: 4691 - DNA, 31 bp, Artificial Sequence
  Description of Artificial Sequence:  Enzymatic Nucleic Acid
tcccggggggctagctacaacgacccgggac

SEQ ID NO: 4692 - DNA, 31 bp, Artificial Sequence
  Description of Artificial Sequence:  Enzymatic Nucleic Acid
actgaccgggctagctacaacgatctcccgg

SEQ ID NO: 4693 - DNA, 31 bp, Artificial Sequence
  Description of Artificial Sequence:  Enzymatic Nucleic Acid
cacactgaggctagctacaacgacgctctcc

SEQ ID NO: 4694 - DNA, 31 bp, Artificial Sequence
  Description of Artificial Sequence:  Enzymatic Nucleic Acid
accacacaggctagctacaacgatgaccgct

SEQ ID NO: 4695 - DNA, 31 bp, Artificial Sequence
  Description of Artificial Sequence:  Enzymatic Nucleic Acid
cgaccacaggctagctacaacgaactgaccg

SEQ ID NO: 4696 - DNA, 31 bp, Artificial Sequence
  Description of Artificial Sequence:  Enzymatic Nucleic Acid
agcgaccaggctagctacaacgaacactgac

SEQ ID NO: 4697 - DNA, 31 bp, Artificial Sequence
  Description of Artificial Sequence:  Enzymatic Nucleic Acid
cgcagcgaggctagctacaacgacacacact

SEQ ID NO: 4698 - DNA, 31 bp, Artificial Sequence
  Description of Artificial Sequence:  Enzymatic Nucleic Acid
aaacgcagggctagctacaacgagaccacac

SEQ ID NO: 4699 - DNA, 31 bp, Artificial Sequence
  Description of Artificial Sequence:  Enzymatic Nucleic Acid
aggaaacgggctagctacaacgaagcgacca

SEQ ID NO: 4700 - DNA, 31 bp, Artificial Sequence
  Description of Artificial Sequence:  Enzymatic Nucleic Acid
agaggaaaggctagctacaacgagcagcgac

SEQ ID NO: 4701 - DNA, 31 bp, Artificial Sequence
  Description of Artificial Sequence:  Enzymatic Nucleic Acid
ggcgcaggggctagctacaacgaagaggaaa

SEQ ID NO: 4702 - DNA, 31 bp, Artificial Sequence
  Description of Artificial Sequence:  Enzymatic Nucleic Acid
gcccggcgggctagctacaacgaaggcagag

SEQ ID NO: 4703 - DNA, 31 bp, Artificial Sequence
  Description of Artificial Sequence:  Enzymatic Nucleic Acid
atgcccggggctagctacaacgagcaggcag

SEQ ID NO: 4704 - DNA, 31 bp, Artificial Sequence
  Description of Artificial Sequence:  Enzymatic Nucleic Acid
aagtgatgggctagctacaacgaccggcgca

SEQ ID NO: 4705 - DNA, 31 bp, Artificial Sequence
  Description of Artificial Sequence:  Enzymatic Nucleic Acid
gcaagtgaggctagctacaacgagcccggcg

SEQ ID NO: 4706 - DNA, 31 bp, Artificial Sequence
  Description of Artificial Sequence:  Enzymatic Nucleic Acid
cgcgcaagggctagctacaacgagatgcccg

SEQ ID NO: 4707 - DNA, 31 bp, Artificial Sequence
  Description of Artificial Sequence:  Enzymatic Nucleic Acid
gcggcgcgggctagctacaacgaaagtgatg

SEQ ID NO: 4708 - DNA, 31 bp, Artificial Sequence
  Description of Artificial Sequence:  Enzymatic Nucleic Acid
ctgcggcgggctagctacaacgagcaagtga

SEQ ID NO: 4709 - DNA, 31 bp, Artificial Sequence
  Description of Artificial Sequence:  Enzymatic Nucleic Acid
ttctgcggggctagctacaacgagcgcaagt

SEQ ID NO: 4710 - DNA, 31 bp, Artificial Sequence
  Description of Artificial Sequence:  Enzymatic Nucleic Acid
actttctgggctagctacaacgaggcgcgca

SEQ ID NO: 4711 - DNA, 31 bp, Artificial Sequence
  Description of Artificial Sequence:  Enzymatic Nucleic Acid
cagacggaggctagctacaacgatttctgcg

SEQ ID NO: 4712 - DNA, 31 bp, Artificial Sequence
  Description of Artificial Sequence:  Enzymatic Nucleic Acid
ctgccagaggctagctacaacgaggactttc

SEQ ID NO: 4713 - DNA, 31 bp, Artificial Sequence
  Description of Artificial Sequence:  Enzymatic Nucleic Acid
ccaggctgggctagctacaacgacagacgga

SEQ ID NO: 4714 - DNA, 31 bp, Artificial Sequence
  Description of Artificial Sequence:  Enzymatic Nucleic Acid
tatccaggggctagctacaacgatgccagac

SEQ ID NO: 4715 - DNA, 31 bp, Artificial Sequence
  Description of Artificial Sequence:  Enzymatic Nucleic Acid
agaggataggctagctacaacgaccaggctg

SEQ ID NO: 4716 - DNA, 31 bp, Artificial Sequence
  Description of Artificial Sequence:  Enzymatic Nucleic Acid
ggagaggaggctagctacaacgaatccaggc

SEQ ID NO: 4717 - DNA, 31 bp, Artificial Sequence
  Description of Artificial Sequence:  Enzymatic Nucleic Acid
ggtgccggggctagctacaacgaaggagagg

SEQ ID NO: 4718 - DNA, 31 bp, Artificial Sequence
  Description of Artificial Sequence:  Enzymatic Nucleic Acid
tgcgggtgggctagctacaacgacggtagga

SEQ ID NO: 4719 - DNA, 31 bp, Artificial Sequence
  Description of Artificial Sequence:  Enzymatic Nucleic Acid
tctgcgggggctagctacaacgagccggtag

SEQ ID NO: 4720 - DNA, 31 bp, Artificial Sequence
  Description of Artificial Sequence:  Enzymatic Nucleic Acid
ggcgtctgggctagctacaacgagggtgccg

SEQ ID NO: 4721 - DNA, 31 bp, Artificial Sequence
  Description of Artificial Sequence:  Enzymatic Nucleic Acid
caggggcgggctagctacaacgactgcgggt

SEQ ID NO: 4722 - DNA, 31 bp, Artificial Sequence
  Description of Artificial Sequence:  Enzymatic Nucleic Acid
tgcaggggggctagctacaacgagtctgcgg

SEQ ID NO: 4723 - DNA, 31 bp, Artificial Sequence
  Description of Artificial Sequence:  Enzymatic Nucleic Acid
ggcggctgggctagctacaacgaaggggcgt

SEQ ID NO: 4724 - DNA, 31 bp, Artificial Sequence
  Description of Artificial Sequence:  Enzymatic Nucleic Acid
accggcggggctagctacaacgatgcagggg

SEQ ID NO: 4725 - DNA, 31 bp, Artificial Sequence
  Description of Artificial Sequence:  Enzymatic Nucleic Acid
ccgaccggggctagctacaacgaggctgcag

SEQ ID NO: 4726 - DNA, 31 bp, Artificial Sequence
  Description of Artificial Sequence:  Enzymatic Nucleic Acid
ggcgccgaggctagctacaacgacggcggct

SEQ ID NO: 4727 - DNA, 31 bp, Artificial Sequence
  Description of Artificial Sequence:  Enzymatic Nucleic Acid
cccgggcgggctagctacaacgacgaccggc

SEQ ID NO: 4728 - DNA, 31 bp, Artificial Sequence
  Description of Artificial Sequence:  Enzymatic Nucleic Acid
agcccgggggctagctacaacgagccgaccg

SEQ ID NO: 4729 - DNA, 31 bp, Artificial Sequence
  Description of Artificial Sequence:  Enzymatic Nucleic Acid
ctagggagggctagctacaacgaccgggcgc

SEQ ID NO: 4730 - DNA, 31 bp, Artificial Sequence
  Description of Artificial Sequence:  Enzymatic Nucleic Acid
gcacagggggctagctacaacgatagggagc

SEQ ID NO: 4731 - DNA, 31 bp, Artificial Sequence
  Description of Artificial Sequence:  Enzymatic Nucleic Acid
tgagcgcaggctagctacaacgaagggctag

SEQ ID NO: 4732 - DNA, 31 bp, Artificial Sequence
  Description of Artificial Sequence:  Enzymatic Nucleic Acid
gttgagcgggctagctacaacgaacagggct

SEQ ID NO: 4733 - DNA, 31 bp, Artificial Sequence
  Description of Artificial Sequence:  Enzymatic Nucleic Acid
cagttgagggctagctacaacgagcacaggg

SEQ ID NO: 4734 - DNA, 31 bp, Artificial Sequence
  Description of Artificial Sequence:  Enzymatic Nucleic Acid
caggacagggctagctacaacgatgagcgca

SEQ ID NO: 4735 - DNA, 31 bp, Artificial Sequence
  Description of Artificial Sequence:  Enzymatic Nucleic Acid
gcgcaggaggctagctacaacgaagttgagc

SEQ ID NO: 4736 - DNA, 31 bp, Artificial Sequence
  Description of Artificial Sequence:  Enzymatic Nucleic Acid
ccgcagcgggctagctacaacgaaggacagt

SEQ ID NO: 4737 - DNA, 31 bp, Artificial Sequence
  Description of Artificial Sequence:  Enzymatic Nucleic Acid
ccccgcagggctagctacaacgagcaggaca

SEQ ID NO: 4738 - DNA, 31 bp, Artificial Sequence
  Description of Artificial Sequence:  Enzymatic Nucleic Acid
gcaccccgggctagctacaacgaagcgcagg

SEQ ID NO: 4739 - DNA, 31 bp, Artificial Sequence
  Description of Artificial Sequence:  Enzymatic Nucleic Acid
tcgcggcaggctagctacaacgacccgcagc

SEQ ID NO: 4740 - DNA, 31 bp, Artificial Sequence
  Description of Artificial Sequence:  Enzymatic Nucleic Acid
actcgcggggctagctacaacgaaccccgca

SEQ ID NO: 4741 - DNA, 31 bp, Artificial Sequence
  Description of Artificial Sequence:  Enzymatic Nucleic Acid
ggaactcgggctagctacaacgaggcacccc

SEQ ID NO: 4742 - DNA, 31 bp, Artificial Sequence
  Description of Artificial Sequence:  Enzymatic Nucleic Acid
aggtggaaggctagctacaacgatcgcggca

SEQ ID NO: 4743 - DNA, 31 bp, Artificial Sequence
  Description of Artificial Sequence:  Enzymatic Nucleic Acid
cgcggaggggctagctacaacgaggaactcg

SEQ ID NO: 4744 - DNA, 31 bp, Artificial Sequence
  Description of Artificial Sequence:  Enzymatic Nucleic Acid
aggaggcgggctagctacaacgaggaggtgg

SEQ ID NO: 4745 - DNA, 31 bp, Artificial Sequence
  Description of Artificial Sequence:  Enzymatic Nucleic Acid
gaaggaggggctagctacaacgagcggaggt

SEQ ID NO: 4746 - DNA, 31 bp, Artificial Sequence
  Description of Artificial Sequence:  Enzymatic Nucleic Acid
agcgcctgggctagctacaacgactagagaa

SEQ ID NO: 4747 - DNA, 31 bp, Artificial Sequence
  Description of Artificial Sequence:  Enzymatic Nucleic Acid
tcccagcgggctagctacaacgactgtctag

SEQ ID NO: 4748 - DNA, 31 bp, Artificial Sequence
  Description of Artificial Sequence:  Enzymatic Nucleic Acid
tctcccagggctagctacaacgagcctgtct

SEQ ID NO: 4749 - DNA, 31 bp, Artificial Sequence
  Description of Artificial Sequence:  Enzymatic Nucleic Acid
ggagccggggctagctacaacgatctttctc

SEQ ID NO: 4750 - DNA, 31 bp, Artificial Sequence
  Description of Artificial Sequence:  Enzymatic Nucleic Acid
ctcgggagggctagctacaacgacggttctt

SEQ ID NO: 4751 - DNA, 31 bp, Artificial Sequence
  Description of Artificial Sequence:  Enzymatic Nucleic Acid
gcccagaaggctagctacaacgatcgggagc

SEQ ID NO: 4752 - DNA, 31 bp, Artificial Sequence
  Description of Artificial Sequence:  Enzymatic Nucleic Acid
gcgaaatgggctagctacaacgaccagaact

SEQ ID NO: 4753 - DNA, 31 bp, Artificial Sequence
  Description of Artificial Sequence:  Enzymatic Nucleic Acid
gggcgaaaggctagctacaacgagcccagaa

SEQ ID NO: 4754 - DNA, 31 bp, Artificial Sequence
  Description of Artificial Sequence:  Enzymatic Nucleic Acid
gagccgggggctagctacaacgagaaatgcc

SEQ ID NO: 4755 - DNA, 31 bp, Artificial Sequence
  Description of Artificial Sequence:  Enzymatic Nucleic Acid
acctcgagggctagctacaacgacgggcgaa

SEQ ID NO: 4756 - DNA, 31 bp, Artificial Sequence
  Description of Artificial Sequence:  Enzymatic Nucleic Acid
atcctgcaggctagctacaacgactcgagcc

SEQ ID NO: 4757 - DNA, 31 bp, Artificial Sequence
  Description of Artificial Sequence:  Enzymatic Nucleic Acid
gcatcctgggctagctacaacgaacctcgag

SEQ ID NO: 4758 - DNA, 31 bp, Artificial Sequence
  Description of Artificial Sequence:  Enzymatic Nucleic Acid
gctctgcaggctagctacaacgacctgcacc

SEQ ID NO: 4759 - DNA, 31 bp, Artificial Sequence
  Description of Artificial Sequence:  Enzymatic Nucleic Acid
ttgctctgggctagctacaacgaatcctgca

SEQ ID NO: 4760 - DNA, 31 bp, Artificial Sequence
  Description of Artificial Sequence:  Enzymatic Nucleic Acid
gcaccttgggctagctacaacgatctgcatc

SEQ ID NO: 4761 - DNA, 31 bp, Artificial Sequence
  Description of Artificial Sequence:  Enzymatic Nucleic Acid
cagcagcaggctagctacaacgacttgctct

SEQ ID NO: 4762 - DNA, 31 bp, Artificial Sequence
  Description of Artificial Sequence:  Enzymatic Nucleic Acid
gccagcagggctagctacaacgaaccttgct

SEQ ID NO: 4763 - DNA, 31 bp, Artificial Sequence
  Description of Artificial Sequence:  Enzymatic Nucleic Acid
acggccagggctagctacaacgaagcacctt

SEQ ID NO: 4764 - DNA, 31 bp, Artificial Sequence
  Description of Artificial Sequence:  Enzymatic Nucleic Acid
ggcgacggggctagctacaacgacagcagca

SEQ ID NO: 4765 - DNA, 31 bp, Artificial Sequence
  Description of Artificial Sequence:  Enzymatic Nucleic Acid
cagggcgaggctagctacaacgaggccagca

SEQ ID NO: 4766 - DNA, 31 bp, Artificial Sequence
  Description of Artificial Sequence:  Enzymatic Nucleic Acid
ccacagggggctagctacaacgagacggcca

SEQ ID NO: 4767 - DNA, 31 bp, Artificial Sequence
  Description of Artificial Sequence:  Enzymatic Nucleic Acid
cagagccaggctagctacaacgaagggcgac

SEQ ID NO: 4768 - DNA, 31 bp, Artificial Sequence
  Description of Artificial Sequence:  Enzymatic Nucleic Acid
acgcagagggctagctacaacgacacagggc

SEQ ID NO: 4769 - DNA, 31 bp, Artificial Sequence
  Description of Artificial Sequence:  Enzymatic Nucleic Acid
tctccacgggctagctacaacgaagagccac

SEQ ID NO: 4770 - DNA, 31 bp, Artificial Sequence
  Description of Artificial Sequence:  Enzymatic Nucleic Acid
ggtctccaggctagctacaacgagcagagcc

SEQ ID NO: 4771 - DNA, 31 bp, Artificial Sequence
  Description of Artificial Sequence:  Enzymatic Nucleic Acid
ggcccgggggctagctacaacgactccacgc

SEQ ID NO: 4772 - DNA, 31 bp, Artificial Sequence
  Description of Artificial Sequence:  Enzymatic Nucleic Acid
agaggcggggctagctacaacgaccgggtct

SEQ ID NO: 4773 - DNA, 31 bp, Artificial Sequence
  Description of Artificial Sequence:  Enzymatic Nucleic Acid
cacagaggggctagctacaacgaggcccggg

SEQ ID NO: 4774 - DNA, 31 bp, Artificial Sequence
  Description of Artificial Sequence:  Enzymatic Nucleic Acid
caaacccaggctagctacaacgaagaggcgg

SEQ ID NO: 4775 - DNA, 31 bp, Artificial Sequence
  Description of Artificial Sequence:  Enzymatic Nucleic Acid
taggcaaaggctagctacaacgaccacagag

SEQ ID NO: 4776 - DNA, 31 bp, Artificial Sequence
  Description of Artificial Sequence:  Enzymatic Nucleic Acid
acactaggggctagctacaacgaaaacccac

SEQ ID NO: 4777 - DNA, 31 bp, Artificial Sequence
  Description of Artificial Sequence:  Enzymatic Nucleic Acid
gagaaacaggctagctacaacgataggcaaa

SEQ ID NO: 4778 - DNA, 31 bp, Artificial Sequence
  Description of Artificial Sequence:  Enzymatic Nucleic Acid
aagagaaaggctagctacaacgaactaggca

SEQ ID NO: 4779 - DNA, 31 bp, Artificial Sequence
  Description of Artificial Sequence:  Enzymatic Nucleic Acid
tgggcagaggctagctacaacgacaagagaa

SEQ ID NO: 4780 - DNA, 31 bp, Artificial Sequence
  Description of Artificial Sequence:  Enzymatic Nucleic Acid
agcctgggggctagctacaacgaagatcaag

SEQ ID NO: 4781 - DNA, 31 bp, Artificial Sequence
  Description of Artificial Sequence:  Enzymatic Nucleic Acid
atgctgagggctagctacaacgactgggcag

SEQ ID NO: 4782 - DNA, 31 bp, Artificial Sequence
  Description of Artificial Sequence:  Enzymatic Nucleic Acid
tttgtatgggctagctacaacgatgagcctg

SEQ ID NO: 4783 - DNA, 31 bp, Artificial Sequence
  Description of Artificial Sequence:  Enzymatic Nucleic Acid
tttttgtaggctagctacaacgagctgagcc

SEQ ID NO: 4784 - DNA, 31 bp, Artificial Sequence
  Description of Artificial Sequence:  Enzymatic Nucleic Acid
tctttttgggctagctacaacgaatgctgag

SEQ ID NO: 4785 - DNA, 31 bp, Artificial Sequence
  Description of Artificial Sequence:  Enzymatic Nucleic Acid
taagtatgggctagctacaacgactttttgt

SEQ ID NO: 4786 - DNA, 31 bp, Artificial Sequence
  Description of Artificial Sequence:  Enzymatic Nucleic Acid
tgtaagtaggctagctacaacgagtcttttt

SEQ ID NO: 4787 - DNA, 31 bp, Artificial Sequence
  Description of Artificial Sequence:  Enzymatic Nucleic Acid
attgtaagggctagctacaacgaatgtcttt

SEQ ID NO: 4788 - DNA, 31 bp, Artificial Sequence
  Description of Artificial Sequence:  Enzymatic Nucleic Acid
cttaattgggctagctacaacgaaagtatgt

SEQ ID NO: 4789 - DNA, 31 bp, Artificial Sequence
  Description of Artificial Sequence:  Enzymatic Nucleic Acid
agccttaaggctagctacaacgatgtaagta

SEQ ID NO: 4790 - DNA, 31 bp, Artificial Sequence
  Description of Artificial Sequence:  Enzymatic Nucleic Acid
tgtattagggctagctacaacgacttaattg

SEQ ID NO: 4791 - DNA, 31 bp, Artificial Sequence
  Description of Artificial Sequence:  Enzymatic Nucleic Acid
gagttgtaggctagctacaacgatagcctta

SEQ ID NO: 4792 - DNA, 31 bp, Artificial Sequence
  Description of Artificial Sequence:  Enzymatic Nucleic Acid
aagagttgggctagctacaacgaattagcct

SEQ ID NO: 4793 - DNA, 31 bp, Artificial Sequence
  Description of Artificial Sequence:  Enzymatic Nucleic Acid
ttgaagagggctagctacaacgatgtattag

SEQ ID NO: 4794 - DNA, 31 bp, Artificial Sequence
  Description of Artificial Sequence:  Enzymatic Nucleic Acid
gcaagtaaggctagctacaacgattgaagag

SEQ ID NO: 4795 - DNA, 31 bp, Artificial Sequence
  Description of Artificial Sequence:  Enzymatic Nucleic Acid
cctgcaagggctagctacaacgaaatttgaa

SEQ ID NO: 4796 - DNA, 31 bp, Artificial Sequence
  Description of Artificial Sequence:  Enzymatic Nucleic Acid
gtcccctgggctagctacaacgaaagtaatt

SEQ ID NO: 4797 - DNA, 31 bp, Artificial Sequence
  Description of Artificial Sequence:  Enzymatic Nucleic Acid
tccctctgggctagctacaacgacccctgca

SEQ ID NO: 4798 - DNA, 31 bp, Artificial Sequence
  Description of Artificial Sequence:  Enzymatic Nucleic Acid
agtccaagggctagctacaacgaccctctgt

SEQ ID NO: 4799 - DNA, 31 bp, Artificial Sequence
  Description of Artificial Sequence:  Enzymatic Nucleic Acid
aaagccagggctagctacaacgaccaagtcc

SEQ ID NO: 4800 - DNA, 31 bp, Artificial Sequence
  Description of Artificial Sequence:  Enzymatic Nucleic Acid
ggccaaagggctagctacaacgacagtccaa

SEQ ID NO: 4801 - DNA, 31 bp, Artificial Sequence
  Description of Artificial Sequence:  Enzymatic Nucleic Acid
ttattgggggctagctacaacgacaaagcca

SEQ ID NO: 4802 - DNA, 31 bp, Artificial Sequence
  Description of Artificial Sequence:  Enzymatic Nucleic Acid
tctgattaggctagctacaacgatgggccaa

SEQ ID NO: 4803 - DNA, 31 bp, Artificial Sequence
  Description of Artificial Sequence:  Enzymatic Nucleic Acid
cactctgaggctagctacaacgatattgggc

SEQ ID NO: 4804 - DNA, 31 bp, Artificial Sequence
  Description of Artificial Sequence:  Enzymatic Nucleic Acid
cactgccaggctagctacaacgatctgatta

SEQ ID NO: 4805 - DNA, 31 bp, Artificial Sequence
  Description of Artificial Sequence:  Enzymatic Nucleic Acid
gctcactgggctagctacaacgacactctga

SEQ ID NO: 4806 - DNA, 31 bp, Artificial Sequence
  Description of Artificial Sequence:  Enzymatic Nucleic Acid
tttgctcaggctagctacaacgatgccactc

SEQ ID NO: 4807 - DNA, 31 bp, Artificial Sequence
  Description of Artificial Sequence:  Enzymatic Nucleic Acid
accctttgggctagctacaacgatcactgcc

SEQ ID NO: 4808 - DNA, 31 bp, Artificial Sequence
  Description of Artificial Sequence:  Enzymatic Nucleic Acid
cacctccaggctagctacaacgacctttgct

SEQ ID NO: 4809 - DNA, 31 bp, Artificial Sequence
  Description of Artificial Sequence:  Enzymatic Nucleic Acid
ctcagtcaggctagctacaacgactccaccc

SEQ ID NO: 4810 - DNA, 31 bp, Artificial Sequence
  Description of Artificial Sequence:  Enzymatic Nucleic Acid
gcactcagggctagctacaacgacacctcca

SEQ ID NO: 4811 - DNA, 31 bp, Artificial Sequence
  Description of Artificial Sequence:  Enzymatic Nucleic Acid
tcgctgcaggctagctacaacgatcagtcac

SEQ ID NO: 4812 - DNA, 31 bp, Artificial Sequence
  Description of Artificial Sequence:  Enzymatic Nucleic Acid
catcgctgggctagctacaacgaactcagtc

SEQ ID NO: 4813 - DNA, 31 bp, Artificial Sequence
  Description of Artificial Sequence:  Enzymatic Nucleic Acid
ggccatcgggctagctacaacgatgcactca

SEQ ID NO: 4814 - DNA, 31 bp, Artificial Sequence
  Description of Artificial Sequence:  Enzymatic Nucleic Acid
agaggccaggctagctacaacgacgctgcac

SEQ ID NO: 4815 - DNA, 31 bp, Artificial Sequence
  Description of Artificial Sequence:  Enzymatic Nucleic Acid
agaagaggggctagctacaacgacatcgctg

SEQ ID NO: 4816 - DNA, 31 bp, Artificial Sequence
  Description of Artificial Sequence:  Enzymatic Nucleic Acid
gtgtcttaggctagctacaacgaagaagagg

SEQ ID NO: 4817 - DNA, 31 bp, Artificial Sequence
  Description of Artificial Sequence:  Enzymatic Nucleic Acid
tgtgagtgggctagctacaacgacttacaga

SEQ ID NO: 4818 - DNA, 31 bp, Artificial Sequence
  Description of Artificial Sequence:  Enzymatic Nucleic Acid
attgtgagggctagctacaacgagtcttaca

SEQ ID NO: 4819 - DNA, 31 bp, Artificial Sequence
  Description of Artificial Sequence:  Enzymatic Nucleic Acid
tggaattgggctagctacaacgagagtgtct

SEQ ID NO: 4820 - DNA, 31 bp, Artificial Sequence
  Description of Artificial Sequence:  Enzymatic Nucleic Acid
ttttggaaggctagctacaacgatgtgagtg

SEQ ID NO: 4821 - DNA, 31 bp, Artificial Sequence
  Description of Artificial Sequence:  Enzymatic Nucleic Acid
tccgatcaggctagctacaacgattttggaa

SEQ ID NO: 4822 - DNA, 31 bp, Artificial Sequence
  Description of Artificial Sequence:  Enzymatic Nucleic Acid
atttccgaggctagctacaacgacacttttg

SEQ ID NO: 4823 - DNA, 31 bp, Artificial Sequence
  Description of Artificial Sequence:  Enzymatic Nucleic Acid
cagtgtcaggctagctacaacgattccgatc

SEQ ID NO: 4824 - DNA, 31 bp, Artificial Sequence
  Description of Artificial Sequence:  Enzymatic Nucleic Acid
ctccagtgggctagctacaacgacatttccg

SEQ ID NO: 4825 - DNA, 31 bp, Artificial Sequence
  Description of Artificial Sequence:  Enzymatic Nucleic Acid
ggctccagggctagctacaacgagtcatttc

SEQ ID NO: 4826 - DNA, 31 bp, Artificial Sequence
  Description of Artificial Sequence:  Enzymatic Nucleic Acid
cttgtaggggctagctacaacgatccagtgt

SEQ ID NO: 4827 - DNA, 31 bp, Artificial Sequence
  Description of Artificial Sequence:  Enzymatic Nucleic Acid
agcacttgggctagctacaacgaaggctcca

SEQ ID NO: 4828 - DNA, 31 bp, Artificial Sequence
  Description of Artificial Sequence:  Enzymatic Nucleic Acid
tagaagcaggctagctacaacgattgtaggc

SEQ ID NO: 4829 - DNA, 31 bp, Artificial Sequence
  Description of Artificial Sequence:  Enzymatic Nucleic Acid
ggtagaagggctagctacaacgaacttgtag

SEQ ID NO: 4830 - DNA, 31 bp, Artificial Sequence
  Description of Artificial Sequence:  Enzymatic Nucleic Acid
tttcccggggctagctacaacgaagaagcac

SEQ ID NO: 4831 - DNA, 31 bp, Artificial Sequence
  Description of Artificial Sequence:  Enzymatic Nucleic Acid
caagtcagggctagctacaacgattcccggt

SEQ ID NO: 4832 - DNA, 31 bp, Artificial Sequence
  Description of Artificial Sequence:  Enzymatic Nucleic Acid
aggccaagggctagctacaacgacagtttcc

SEQ ID NO: 4833 - DNA, 31 bp, Artificial Sequence
  Description of Artificial Sequence:  Enzymatic Nucleic Acid
gaccgaggggctagctacaacgacaagtcag

SEQ ID NO: 4834 - DNA, 31 bp, Artificial Sequence
  Description of Artificial Sequence:  Enzymatic Nucleic Acid
ataaatgaggctagctacaacgacgaggcca

SEQ ID NO: 4835 - DNA, 31 bp, Artificial Sequence
  Description of Artificial Sequence:  Enzymatic Nucleic Acid
gacataaaggctagctacaacgagaccgagg

SEQ ID NO: 4836 - DNA, 31 bp, Artificial Sequence
  Description of Artificial Sequence:  Enzymatic Nucleic Acid
catagacaggctagctacaacgaaaatgacc

SEQ ID NO: 4837 - DNA, 31 bp, Artificial Sequence
  Description of Artificial Sequence:  Enzymatic Nucleic Acid
aacatagaggctagctacaacgaataaatga

SEQ ID NO: 4838 - DNA, 31 bp, Artificial Sequence
  Description of Artificial Sequence:  Enzymatic Nucleic Acid
cttgaacaggctagctacaacgaagacataa

SEQ ID NO: 4839 - DNA, 31 bp, Artificial Sequence
  Description of Artificial Sequence:  Enzymatic Nucleic Acid
atcttgaaggctagctacaacgaatagacat

SEQ ID NO: 4840 - DNA, 31 bp, Artificial Sequence
  Description of Artificial Sequence:  Enzymatic Nucleic Acid
atctgtaaggctagctacaacgacttgaaca

SEQ ID NO: 4841 - DNA, 31 bp, Artificial Sequence
  Description of Artificial Sequence:  Enzymatic Nucleic Acid
gagatctgggctagctacaacgaaatcttga

SEQ ID NO: 4842 - DNA, 31 bp, Artificial Sequence
  Description of Artificial Sequence:  Enzymatic Nucleic Acid
aatggagaggctagctacaacgactgtaatc

SEQ ID NO: 4843 - DNA, 31 bp, Artificial Sequence
  Description of Artificial Sequence:  Enzymatic Nucleic Acid
gcaataaaggctagctacaacgaggagatct

SEQ ID NO: 4844 - DNA, 31 bp, Artificial Sequence
  Description of Artificial Sequence:  Enzymatic Nucleic Acid
agaagcaaggctagctacaacgaaaatggag

SEQ ID NO: 4845 - DNA, 31 bp, Artificial Sequence
  Description of Artificial Sequence:  Enzymatic Nucleic Acid
aacagaagggctagctacaacgaaataaatg

SEQ ID NO: 4846 - DNA, 31 bp, Artificial Sequence
  Description of Artificial Sequence:  Enzymatic Nucleic Acid
gtcactaaggctagctacaacgaagaagcaa

SEQ ID NO: 4847 - DNA, 31 bp, Artificial Sequence
  Description of Artificial Sequence:  Enzymatic Nucleic Acid
gttggtcaggctagctacaacgataacagaa

SEQ ID NO: 4848 - DNA, 31 bp, Artificial Sequence
  Description of Artificial Sequence:  Enzymatic Nucleic Acid
catgttggggctagctacaacgacactaaca

SEQ ID NO: 4849 - DNA, 31 bp, Artificial Sequence
  Description of Artificial Sequence:  Enzymatic Nucleic Acid
actccatgggctagctacaacgatggtcact

SEQ ID NO: 4850 - DNA, 31 bp, Artificial Sequence
  Description of Artificial Sequence:  Enzymatic Nucleic Acid
cgactccaggctagctacaacgagttggtca

SEQ ID NO: 4851 - DNA, 31 bp, Artificial Sequence
  Description of Artificial Sequence:  Enzymatic Nucleic Acid
gtacacgaggctagctacaacgatccatgtt

SEQ ID NO: 4852 - DNA, 31 bp, Artificial Sequence
  Description of Artificial Sequence:  Enzymatic Nucleic Acid
aatgtacaggctagctacaacgagactccat

SEQ ID NO: 4853 - DNA, 31 bp, Artificial Sequence
  Description of Artificial Sequence:  Enzymatic Nucleic Acid
gtaatgtaggctagctacaacgaacgactcc

SEQ ID NO: 4854 - DNA, 31 bp, Artificial Sequence
  Description of Artificial Sequence:  Enzymatic Nucleic Acid
cagtaatgggctagctacaacgaacacgact

SEQ ID NO: 4855 - DNA, 31 bp, Artificial Sequence
  Description of Artificial Sequence:  Enzymatic Nucleic Acid
ctcagtaaggctagctacaacgagtacacga

SEQ ID NO: 4856 - DNA, 31 bp, Artificial Sequence
  Description of Artificial Sequence:  Enzymatic Nucleic Acid
gttctcagggctagctacaacgaaatgtaca

SEQ ID NO: 4857 - DNA, 31 bp, Artificial Sequence
  Description of Artificial Sequence:  Enzymatic Nucleic Acid
tgtttttgggctagctacaacgatctcagta

SEQ ID NO: 4858 - DNA, 31 bp, Artificial Sequence
  Description of Artificial Sequence:  Enzymatic Nucleic Acid
cagttttgggctagctacaacgattttgttc

SEQ ID NO: 4859 - DNA, 31 bp, Artificial Sequence
  Description of Artificial Sequence:  Enzymatic Nucleic Acid
caccacagggctagctacaacgatttgtttt

SEQ ID NO: 4860 - DNA, 31 bp, Artificial Sequence
  Description of Artificial Sequence:  Enzymatic Nucleic Acid
aatcaccaggctagctacaacgaagttttgt

SEQ ID NO: 4861 - DNA, 31 bp, Artificial Sequence
  Description of Artificial Sequence:  Enzymatic Nucleic Acid
tggaatcaggctagctacaacgacacagttt

SEQ ID NO: 4862 - DNA, 31 bp, Artificial Sequence
  Description of Artificial Sequence:  Enzymatic Nucleic Acid
acatggaaggctagctacaacgacaccacag

SEQ ID NO: 4863 - DNA, 31 bp, Artificial Sequence
  Description of Artificial Sequence:  Enzymatic Nucleic Acid
ccgagacaggctagctacaacgaggaatcac

SEQ ID NO: 4864 - DNA, 31 bp, Artificial Sequence
  Description of Artificial Sequence:  Enzymatic Nucleic Acid
acccgagaggctagctacaacgaatggaatc

SEQ ID NO: 4865 - DNA, 31 bp, Artificial Sequence
  Description of Artificial Sequence:  Enzymatic Nucleic Acid
gaaatggaggctagctacaacgaccgagaca

SEQ ID NO: 4866 - DNA, 31 bp, Artificial Sequence
  Description of Artificial Sequence:  Enzymatic Nucleic Acid
atttgaaaggctagctacaacgaggacccga

SEQ ID NO: 4867 - DNA, 31 bp, Artificial Sequence
  Description of Artificial Sequence:  Enzymatic Nucleic Acid
cgttgagaggctagctacaacgattgaaatg

SEQ ID NO: 4868 - DNA, 31 bp, Artificial Sequence
  Description of Artificial Sequence:  Enzymatic Nucleic Acid
gtgacacgggctagctacaacgatgagattt

SEQ ID NO: 4869 - DNA, 31 bp, Artificial Sequence
  Description of Artificial Sequence:  Enzymatic Nucleic Acid
aagtgacaggctagctacaacgagttgagat

SEQ ID NO: 4870 - DNA, 31 bp, Artificial Sequence
  Description of Artificial Sequence:  Enzymatic Nucleic Acid
caaagtgaggctagctacaacgaacgttgag

SEQ ID NO: 4871 - DNA, 31 bp, Artificial Sequence
  Description of Artificial Sequence:  Enzymatic Nucleic Acid
gcacaaagggctagctacaacgagacacgtt

SEQ ID NO: 4872 - DNA, 31 bp, Artificial Sequence
  Description of Artificial Sequence:  Enzymatic Nucleic Acid
atcttgcaggctagctacaacgaaaagtgac

SEQ ID NO: 4873 - DNA, 31 bp, Artificial Sequence
  Description of Artificial Sequence:  Enzymatic Nucleic Acid
gtatcttgggctagctacaacgaacaaagtg

SEQ ID NO: 4874 - DNA, 31 bp, Artificial Sequence
  Description of Artificial Sequence:  Enzymatic Nucleic Acid
tctgggtaggctagctacaacgacttgcaca

SEQ ID NO: 4875 - DNA, 31 bp, Artificial Sequence
  Description of Artificial Sequence:  Enzymatic Nucleic Acid
tttctgggggctagctacaacgaatcttgca

SEQ ID NO: 4876 - DNA, 31 bp, Artificial Sequence
  Description of Artificial Sequence:  Enzymatic Nucleic Acid
ggaacaaaggctagctacaacgactcttttc

SEQ ID NO: 4877 - DNA, 31 bp, Artificial Sequence
  Description of Artificial Sequence:  Enzymatic Nucleic Acid
atcaggaaggctagctacaacgaaaatctct

SEQ ID NO: 4878 - DNA, 31 bp, Artificial Sequence
  Description of Artificial Sequence:  Enzymatic Nucleic Acid
tgttaccaggctagctacaacgacaggaaca

SEQ ID NO: 4879 - DNA, 31 bp, Artificial Sequence
  Description of Artificial Sequence:  Enzymatic Nucleic Acid
ttctgttaggctagctacaacgacatcagga

SEQ ID NO: 4880 - DNA, 31 bp, Artificial Sequence
  Description of Artificial Sequence:  Enzymatic Nucleic Acid
aaattctgggctagctacaacgataccatca

SEQ ID NO: 4881 - DNA, 31 bp, Artificial Sequence
  Description of Artificial Sequence:  Enzymatic Nucleic Acid
ccaggaaaggctagctacaacgatctgttac

SEQ ID NO: 4882 - DNA, 31 bp, Artificial Sequence
  Description of Artificial Sequence:  Enzymatic Nucleic Acid
tcttgctgggctagctacaacgacccaggaa

SEQ ID NO: 4883 - DNA, 31 bp, Artificial Sequence
  Description of Artificial Sequence:  Enzymatic Nucleic Acid
ccttcttgggctagctacaacgatgtcccag

SEQ ID NO: 4884 - DNA, 31 bp, Artificial Sequence
  Description of Artificial Sequence:  Enzymatic Nucleic Acid
tagtaaagggctagctacaacgaccttcttg

SEQ ID NO: 4885 - DNA, 31 bp, Artificial Sequence
  Description of Artificial Sequence:  Enzymatic Nucleic Acid
gggaatagggctagctacaacgaaaagccct

SEQ ID NO: 4886 - DNA, 31 bp, Artificial Sequence
  Description of Artificial Sequence:  Enzymatic Nucleic Acid
gctgggaaggctagctacaacgaagtaaagc

SEQ ID NO: 4887 - DNA, 31 bp, Artificial Sequence
  Description of Artificial Sequence:  Enzymatic Nucleic Acid
tcatgtagggctagctacaacgatgggaata

SEQ ID NO: 4888 - DNA, 31 bp, Artificial Sequence
  Description of Artificial Sequence:  Enzymatic Nucleic Acid
tgatcatgggctagctacaacgaagctggga

SEQ ID NO: 4889 - DNA, 31 bp, Artificial Sequence
  Description of Artificial Sequence:  Enzymatic Nucleic Acid
gctgatcaggctagctacaacgagtagctgg

SEQ ID NO: 4890 - DNA, 31 bp, Artificial Sequence
  Description of Artificial Sequence:  Enzymatic Nucleic Acid
atagctgaggctagctacaacgacatgtagc

SEQ ID NO: 4891 - DNA, 31 bp, Artificial Sequence
  Description of Artificial Sequence:  Enzymatic Nucleic Acid
cagcatagggctagctacaacgatgatcatg

SEQ ID NO: 4892 - DNA, 31 bp, Artificial Sequence
  Description of Artificial Sequence:  Enzymatic Nucleic Acid
tgccagcaggctagctacaacgaagctgatc

SEQ ID NO: 4893 - DNA, 31 bp, Artificial Sequence
  Description of Artificial Sequence:  Enzymatic Nucleic Acid
catgccagggctagctacaacgaatagctga

SEQ ID NO: 4894 - DNA, 31 bp, Artificial Sequence
  Description of Artificial Sequence:  Enzymatic Nucleic Acid
agaccatgggctagctacaacgacagcatag

SEQ ID NO: 4895 - DNA, 31 bp, Artificial Sequence
  Description of Artificial Sequence:  Enzymatic Nucleic Acid
gaagaccaggctagctacaacgagccagcat

SEQ ID NO: 4896 - DNA, 31 bp, Artificial Sequence
  Description of Artificial Sequence:  Enzymatic Nucleic Acid
acagaagaggctagctacaacgacatgccag

SEQ ID NO: 4897 - DNA, 31 bp, Artificial Sequence
  Description of Artificial Sequence:  Enzymatic Nucleic Acid
ttgcttcaggctagctacaacgaagaagacc

SEQ ID NO: 4898 - DNA, 31 bp, Artificial Sequence
  Description of Artificial Sequence:  Enzymatic Nucleic Acid
aatttttgggctagctacaacgattcacaga

SEQ ID NO: 4899 - DNA, 31 bp, Artificial Sequence
  Description of Artificial Sequence:  Enzymatic Nucleic Acid
atcattaaggctagctacaacgattttgctt

SEQ ID NO: 4900 - DNA, 31 bp, Artificial Sequence
  Description of Artificial Sequence:  Enzymatic Nucleic Acid
tttcatcaggctagctacaacgataattttt

SEQ ID NO: 4901 - DNA, 31 bp, Artificial Sequence
  Description of Artificial Sequence:  Enzymatic Nucleic Acid
aactttcaggctagctacaacgacattaatt

SEQ ID NO: 4902 - DNA, 31 bp, Artificial Sequence
  Description of Artificial Sequence:  Enzymatic Nucleic Acid
actggtaaggctagctacaacgatttcatca

SEQ ID NO: 4903 - DNA, 31 bp, Artificial Sequence
  Description of Artificial Sequence:  Enzymatic Nucleic Acid
tagactggggctagctacaacgaaactttca

SEQ ID NO: 4904 - DNA, 31 bp, Artificial Sequence
  Description of Artificial Sequence:  Enzymatic Nucleic Acid
ataatagaggctagctacaacgatggtaact

SEQ ID NO: 4905 - DNA, 31 bp, Artificial Sequence
  Description of Artificial Sequence:  Enzymatic Nucleic Acid
gtacataaggctagctacaacgaagactggt

SEQ ID NO: 4906 - DNA, 31 bp, Artificial Sequence
  Description of Artificial Sequence:  Enzymatic Nucleic Acid
tatgtacaggctagctacaacgaaatagact

SEQ ID NO: 4907 - DNA, 31 bp, Artificial Sequence
  Description of Artificial Sequence:  Enzymatic Nucleic Acid
actatgtaggctagctacaacgaataataga

SEQ ID NO: 4908 - DNA, 31 bp, Artificial Sequence
  Description of Artificial Sequence:  Enzymatic Nucleic Acid
caactatgggctagctacaacgaacataata

SEQ ID NO: 4909 - DNA, 31 bp, Artificial Sequence
  Description of Artificial Sequence:  Enzymatic Nucleic Acid
gacaactaggctagctacaacgagtacataa

SEQ ID NO: 4910 - DNA, 31 bp, Artificial Sequence
  Description of Artificial Sequence:  Enzymatic Nucleic Acid
aacgacaaggctagctacaacgatatgtaca

SEQ ID NO: 4911 - DNA, 31 bp, Artificial Sequence
  Description of Artificial Sequence:  Enzymatic Nucleic Acid
tacaacgaggctagctacaacgaaactatgt

SEQ ID NO: 4912 - DNA, 31 bp, Artificial Sequence
  Description of Artificial Sequence:  Enzymatic Nucleic Acid
ccctacaaggctagctacaacgagacaacta

SEQ ID NO: 4913 - DNA, 31 bp, Artificial Sequence
  Description of Artificial Sequence:  Enzymatic Nucleic Acid
ataccctaggctagctacaacgaaacgacaa

SEQ ID NO: 4914 - DNA, 31 bp, Artificial Sequence
  Description of Artificial Sequence:  Enzymatic Nucleic Acid
atcctataggctagctacaacgacctacaac

SEQ ID NO: 4915 - DNA, 31 bp, Artificial Sequence
  Description of Artificial Sequence:  Enzymatic Nucleic Acid
aaatcctaggctagctacaacgaaccctaca

SEQ ID NO: 4916 - DNA, 31 bp, Artificial Sequence
  Description of Artificial Sequence:  Enzymatic Nucleic Acid
atcataaaggctagctacaacgacctatacc

SEQ ID NO: 4917 - DNA, 31 bp, Artificial Sequence
  Description of Artificial Sequence:  Enzymatic Nucleic Acid
ccacatcaggctagctacaacgaaaatccta

SEQ ID NO: 4918 - DNA, 31 bp, Artificial Sequence
  Description of Artificial Sequence:  Enzymatic Nucleic Acid
gaaccacaggctagctacaacgacataaatc

SEQ ID NO: 4919 - DNA, 31 bp, Artificial Sequence
  Description of Artificial Sequence:  Enzymatic Nucleic Acid
cagaaccaggctagctacaacgaatcataaa

SEQ ID NO: 4920 - DNA, 31 bp, Artificial Sequence
  Description of Artificial Sequence:  Enzymatic Nucleic Acid
actcagaaggctagctacaacgacacatcat

SEQ ID NO: 4921 - DNA, 31 bp, Artificial Sequence
  Description of Artificial Sequence:  Enzymatic Nucleic Acid
gagacggaggctagctacaacgatcagaacc

SEQ ID NO: 4922 - DNA, 31 bp, Artificial Sequence
  Description of Artificial Sequence:  Enzymatic Nucleic Acid
ccatgagaggctagctacaacgaggactcag

SEQ ID NO: 4923 - DNA, 31 bp, Artificial Sequence
  Description of Artificial Sequence:  Enzymatic Nucleic Acid
caattccaggctagctacaacgagagacgga

SEQ ID NO: 4924 - DNA, 31 bp, Artificial Sequence
  Description of Artificial Sequence:  Enzymatic Nucleic Acid
tagttcaaggctagctacaacgatccatgag

SEQ ID NO: 4925 - DNA, 31 bp, Artificial Sequence
  Description of Artificial Sequence:  Enzymatic Nucleic Acid
acagatagggctagctacaacgatcaattcc

SEQ ID NO: 4926 - DNA, 31 bp, Artificial Sequence
  Description of Artificial Sequence:  Enzymatic Nucleic Acid
ccaacagaggctagctacaacgaagttcaat

SEQ ID NO: 4927 - DNA, 31 bp, Artificial Sequence
  Description of Artificial Sequence:  Enzymatic Nucleic Acid
ttctccaaggctagctacaacgaagatagtt

SEQ ID NO: 4928 - DNA, 31 bp, Artificial Sequence
  Description of Artificial Sequence:  Enzymatic Nucleic Acid
aagacaagggctagctacaacgattttctcc

SEQ ID NO: 4929 - DNA, 31 bp, Artificial Sequence
  Description of Artificial Sequence:  Enzymatic Nucleic Acid
atttaagaggctagctacaacgaaagctttt

SEQ ID NO: 4930 - DNA, 31 bp, Artificial Sequence
  Description of Artificial Sequence:  Enzymatic Nucleic Acid
ctgtacaaggctagctacaacgattaagaca

SEQ ID NO: 4931 - DNA, 31 bp, Artificial Sequence
  Description of Artificial Sequence:  Enzymatic Nucleic Acid
ttgctgtaggctagctacaacgaaatttaag

SEQ ID NO: 4932 - DNA, 31 bp, Artificial Sequence
  Description of Artificial Sequence:  Enzymatic Nucleic Acid
tcttgctgggctagctacaacgaacaattta

SEQ ID NO: 4933 - DNA, 31 bp, Artificial Sequence
  Description of Artificial Sequence:  Enzymatic Nucleic Acid
agttcttgggctagctacaacgatgtacaat

SEQ ID NO: 4934 - DNA, 31 bp, Artificial Sequence
  Description of Artificial Sequence:  Enzymatic Nucleic Acid
tagttcagggctagctacaacgatcttgctg

SEQ ID NO: 4935 - DNA, 31 bp, Artificial Sequence
  Description of Artificial Sequence:  Enzymatic Nucleic Acid
acatttagggctagctacaacgatcagttct

SEQ ID NO: 4936 - DNA, 31 bp, Artificial Sequence
  Description of Artificial Sequence:  Enzymatic Nucleic Acid
tccccacaggctagctacaacgattagttca

SEQ ID NO: 4937 - DNA, 31 bp, Artificial Sequence
  Description of Artificial Sequence:  Enzymatic Nucleic Acid
aatccccaggctagctacaacgaatttagtt

SEQ ID NO: 4938 - DNA, 31 bp, Artificial Sequence
  Description of Artificial Sequence:  Enzymatic Nucleic Acid
gaagtcaaggctagctacaacgaccccacat

SEQ ID NO: 4939 - DNA, 31 bp, Artificial Sequence
  Description of Artificial Sequence:  Enzymatic Nucleic Acid
agttgaagggctagctacaacgacaatcccc

SEQ ID NO: 4940 - DNA, 31 bp, Artificial Sequence
  Description of Artificial Sequence:  Enzymatic Nucleic Acid
attcccagggctagctacaacgatgaagtca

SEQ ID NO: 4941 - DNA, 31 bp, Artificial Sequence
  Description of Artificial Sequence:  Enzymatic Nucleic Acid
gaagggtaggctagctacaacgatcccagtt

SEQ ID NO: 4942 - DNA, 31 bp, Artificial Sequence
  Description of Artificial Sequence:  Enzymatic Nucleic Acid
aagaagggggctagctacaacgaattcccag

SEQ ID NO: 4943 - DNA, 31 bp, Artificial Sequence
  Description of Artificial Sequence:  Enzymatic Nucleic Acid
tgctgatgggctagctacaacgattcgaaga

SEQ ID NO: 4944 - DNA, 31 bp, Artificial Sequence
  Description of Artificial Sequence:  Enzymatic Nucleic Acid
tatgctgaggctagctacaacgagcttcgaa

SEQ ID NO: 4945 - DNA, 31 bp, Artificial Sequence
  Description of Artificial Sequence:  Enzymatic Nucleic Acid
ttcttatgggctagctacaacgatgatgctt

SEQ ID NO: 4946 - DNA, 31 bp, Artificial Sequence
  Description of Artificial Sequence:  Enzymatic Nucleic Acid
gtttcttaggctagctacaacgagctgatgc

SEQ ID NO: 4947 - DNA, 31 bp, Artificial Sequence
  Description of Artificial Sequence:  Enzymatic Nucleic Acid
tttacaagggctagctacaacgattcttatg

SEQ ID NO: 4948 - DNA, 31 bp, Artificial Sequence
  Description of Artificial Sequence:  Enzymatic Nucleic Acid
tcggtttaggctagctacaacgaaagtttct

SEQ ID NO: 4949 - DNA, 31 bp, Artificial Sequence
  Description of Artificial Sequence:  Enzymatic Nucleic Acid
ggtctcggggctagctacaacgattacaagt

SEQ ID NO: 4950 - DNA, 31 bp, Artificial Sequence
  Description of Artificial Sequence:  Enzymatic Nucleic Acid
tttttaggggctagctacaacgactcggttt

SEQ ID NO: 4951 - DNA, 31 bp, Artificial Sequence
  Description of Artificial Sequence:  Enzymatic Nucleic Acid
agactgggggctagctacaacgattttaggt

SEQ ID NO: 4952 - DNA, 31 bp, Artificial Sequence
  Description of Artificial Sequence:  Enzymatic Nucleic Acid
ctcccagaggctagctacaacgatgggtttt

SEQ ID NO: 4953 - DNA, 31 bp, Artificial Sequence
  Description of Artificial Sequence:  Enzymatic Nucleic Acid
tcatctcaggctagctacaacgatcccagac

SEQ ID NO: 4954 - DNA, 31 bp, Artificial Sequence
  Description of Artificial Sequence:  Enzymatic Nucleic Acid
tttcttcaggctagctacaacgactcactcc

SEQ ID NO: 4955 - DNA, 31 bp, Artificial Sequence
  Description of Artificial Sequence:  Enzymatic Nucleic Acid
ctcaaaaaggctagctacaacgattcttcat

SEQ ID NO: 4956 - DNA, 31 bp, Artificial Sequence
  Description of Artificial Sequence:  Enzymatic Nucleic Acid
ttaaggtgggctagctacaacgatcaaaaat

SEQ ID NO: 4957 - DNA, 31 bp, Artificial Sequence
  Description of Artificial Sequence:  Enzymatic Nucleic Acid
agttaaggggctagctacaacgagctcaaaa

SEQ ID NO: 4958 - DNA, 31 bp, Artificial Sequence
  Description of Artificial Sequence:  Enzymatic Nucleic Acid
atctatagggctagctacaacgataaggtgc

SEQ ID NO: 4959 - DNA, 31 bp, Artificial Sequence
  Description of Artificial Sequence:  Enzymatic Nucleic Acid
accatctaggctagctacaacgaagttaagg

SEQ ID NO: 4960 - DNA, 31 bp, Artificial Sequence
  Description of Artificial Sequence:  Enzymatic Nucleic Acid
ttacaccaggctagctacaacgactatagtt

SEQ ID NO: 4961 - DNA, 31 bp, Artificial Sequence
  Description of Artificial Sequence:  Enzymatic Nucleic Acid
gggttacaggctagctacaacgacatctata

SEQ ID NO: 4962 - DNA, 31 bp, Artificial Sequence
  Description of Artificial Sequence:  Enzymatic Nucleic Acid
ccgggttaggctagctacaacgaaccatcta

SEQ ID NO: 4963 - DNA, 31 bp, Artificial Sequence
  Description of Artificial Sequence:  Enzymatic Nucleic Acid
actccgggggctagctacaacgatacaccat

SEQ ID NO: 4964 - DNA, 31 bp, Artificial Sequence
  Description of Artificial Sequence:  Enzymatic Nucleic Acid
cttggtcaggctagctacaacgatccgggtt

SEQ ID NO: 4965 - DNA, 31 bp, Artificial Sequence
  Description of Artificial Sequence:  Enzymatic Nucleic Acid
atccttggggctagctacaacgacactccgg

SEQ ID NO: 4966 - DNA, 31 bp, Artificial Sequence
  Description of Artificial Sequence:  Enzymatic Nucleic Acid
gtgtacaaggctagctacaacgaccttggtc

SEQ ID NO: 4967 - DNA, 31 bp, Artificial Sequence
  Description of Artificial Sequence:  Enzymatic Nucleic Acid
caggtgtaggctagctacaacgaaatccttg

SEQ ID NO: 4968 - DNA, 31 bp, Artificial Sequence
  Description of Artificial Sequence:  Enzymatic Nucleic Acid
cacaggtgggctagctacaacgaacaatcct

SEQ ID NO: 4969 - DNA, 31 bp, Artificial Sequence
  Description of Artificial Sequence:  Enzymatic Nucleic Acid
tgcacaggggctagctacaacgagtacaatc

SEQ ID NO: 4970 - DNA, 31 bp, Artificial Sequence
  Description of Artificial Sequence:  Enzymatic Nucleic Acid
atgctgcaggctagctacaacgaaggtgtac

SEQ ID NO: 4971 - DNA, 31 bp, Artificial Sequence
  Description of Artificial Sequence:  Enzymatic Nucleic Acid
ggatgctgggctagctacaacgaacaggtgt

SEQ ID NO: 4972 - DNA, 31 bp, Artificial Sequence
  Description of Artificial Sequence:  Enzymatic Nucleic Acid
actggatgggctagctacaacgatgcacagg

SEQ ID NO: 4973 - DNA, 31 bp, Artificial Sequence
  Description of Artificial Sequence:  Enzymatic Nucleic Acid
ccactggaggctagctacaacgagctgcaca

SEQ ID NO: 4974 - DNA, 31 bp, Artificial Sequence
  Description of Artificial Sequence:  Enzymatic Nucleic Acid
tcagcccaggctagctacaacgatggatgct

SEQ ID NO: 4975 - DNA, 31 bp, Artificial Sequence
  Description of Artificial Sequence:  Enzymatic Nucleic Acid
gtcatcagggctagctacaacgaccactgga

SEQ ID NO: 4976 - DNA, 31 bp, Artificial Sequence
  Description of Artificial Sequence:  Enzymatic Nucleic Acid
cttggtcaggctagctacaacgacagcccac

SEQ ID NO: 4977 - DNA, 31 bp, Artificial Sequence
  Description of Artificial Sequence:  Enzymatic Nucleic Acid
cttcttggggctagctacaacgacatcagcc

SEQ ID NO: 4978 - DNA, 31 bp, Artificial Sequence
  Description of Artificial Sequence:  Enzymatic Nucleic Acid
atgtgctgggctagctacaacgatcttcttg

SEQ ID NO: 4979 - DNA, 31 bp, Artificial Sequence
  Description of Artificial Sequence:  Enzymatic Nucleic Acid
caaatgtgggctagctacaacgatgttcttc

SEQ ID NO: 4980 - DNA, 31 bp, Artificial Sequence
  Description of Artificial Sequence:  Enzymatic Nucleic Acid
gacaaatgggctagctacaacgagctgttct

SEQ ID NO: 4981 - DNA, 31 bp, Artificial Sequence
  Description of Artificial Sequence:  Enzymatic Nucleic Acid
ctgacaaaggctagctacaacgagtgctgtt

SEQ ID NO: 4982 - DNA, 31 bp, Artificial Sequence
  Description of Artificial Sequence:  Enzymatic Nucleic Acid
gaccctgaggctagctacaacgaaaatgtgc

SEQ ID NO: 4983 - DNA, 31 bp, Artificial Sequence
  Description of Artificial Sequence:  Enzymatic Nucleic Acid
ttcatggaggctagctacaacgacctgacaa

SEQ ID NO: 4984 - DNA, 31 bp, Artificial Sequence
  Description of Artificial Sequence:  Enzymatic Nucleic Acid
gtttttcaggctagctacaacgaggaccctg

SEQ ID NO: 4985 - DNA, 31 bp, Artificial Sequence
  Description of Artificial Sequence:  Enzymatic Nucleic Acid
acaaaaggggctagctacaacgattttcatg

SEQ ID NO: 4986 - DNA, 31 bp, Artificial Sequence
  Description of Artificial Sequence:  Enzymatic Nucleic Acid
aaaagcaaggctagctacaacgaaaaaggtt

SEQ ID NO: 4987 - DNA, 31 bp, Artificial Sequence
  Description of Artificial Sequence:  Enzymatic Nucleic Acid
tccaaaagggctagctacaacgaaacaaaag

SEQ ID NO: 4988 - DNA, 31 bp, Artificial Sequence
  Description of Artificial Sequence:  Enzymatic Nucleic Acid
ccatgccaggctagctacaacgattccaaaa

SEQ ID NO: 4989 - DNA, 31 bp, Artificial Sequence
  Description of Artificial Sequence:  Enzymatic Nucleic Acid
attccatgggctagctacaacgacacttcca

SEQ ID NO: 4990 - DNA, 31 bp, Artificial Sequence
  Description of Artificial Sequence:  Enzymatic Nucleic Acid
agattccaggctagctacaacgagccacttc

SEQ ID NO: 4991 - DNA, 31 bp, Artificial Sequence
  Description of Artificial Sequence:  Enzymatic Nucleic Acid
accagagaggctagctacaacgatccatgcc

SEQ ID NO: 4992 - DNA, 31 bp, Artificial Sequence
  Description of Artificial Sequence:  Enzymatic Nucleic Acid
ggcttccaggctagctacaacgacagagatt

SEQ ID NO: 4993 - DNA, 31 bp, Artificial Sequence
  Description of Artificial Sequence:  Enzymatic Nucleic Acid
caccgtggggctagctacaacgattccacca

SEQ ID NO: 4994 - DNA, 31 bp, Artificial Sequence
  Description of Artificial Sequence:  Enzymatic Nucleic Acid
ccccaccgggctagctacaacgaggcttcca

SEQ ID NO: 4995 - DNA, 31 bp, Artificial Sequence
  Description of Artificial Sequence:  Enzymatic Nucleic Acid
ctcccccaggctagctacaacgacgtggctt

SEQ ID NO: 4996 - DNA, 31 bp, Artificial Sequence
  Description of Artificial Sequence:  Enzymatic Nucleic Acid
ctgacacgggctagctacaacgatcccccac

SEQ ID NO: 4997 - DNA, 31 bp, Artificial Sequence
  Description of Artificial Sequence:  Enzymatic Nucleic Acid
ttctgacaggctagctacaacgagctccccc

SEQ ID NO: 4998 - DNA, 31 bp, Artificial Sequence
  Description of Artificial Sequence:  Enzymatic Nucleic Acid
gattctgaggctagctacaacgaacgctccc

SEQ ID NO: 4999 - DNA, 31 bp, Artificial Sequence
  Description of Artificial Sequence:  Enzymatic Nucleic Acid
cgcagggaggctagctacaacgatctgacac

SEQ ID NO: 5000 - DNA, 31 bp, Artificial Sequence
  Description of Artificial Sequence:  Enzymatic Nucleic Acid
gtacttcgggctagctacaacgaagggattc

SEQ ID NO: 5001 - DNA, 31 bp, Artificial Sequence
  Description of Artificial Sequence:  Enzymatic Nucleic Acid
ccaaggtaggctagctacaacgattcgcagg

SEQ ID NO: 5002 - DNA, 31 bp, Artificial Sequence
  Description of Artificial Sequence:  Enzymatic Nucleic Acid
aaccaaggggctagctacaacgaacttcgca

SEQ ID NO: 5003 - DNA, 31 bp, Artificial Sequence
  Description of Artificial Sequence:  Enzymatic Nucleic Acid
gtgggtaaggctagctacaacgacaaggtac

SEQ ID NO: 5004 - DNA, 31 bp, Artificial Sequence
  Description of Artificial Sequence:  Enzymatic Nucleic Acid
ggggtgggggctagctacaacgaaaccaagg

SEQ ID NO: 5005 - DNA, 31 bp, Artificial Sequence
  Description of Artificial Sequence:  Enzymatic Nucleic Acid
tctgggggggctagctacaacgagggtaacc

SEQ ID NO: 5006 - DNA, 31 bp, Artificial Sequence
  Description of Artificial Sequence:  Enzymatic Nucleic Acid
ccattttaggctagctacaacgattctgggg

SEQ ID NO: 5007 - DNA, 31 bp, Artificial Sequence
  Description of Artificial Sequence:  Enzymatic Nucleic Acid
ttataccaggctagctacaacgatttatttc

SEQ ID NO: 5008 - DNA, 31 bp, Artificial Sequence
  Description of Artificial Sequence:  Enzymatic Nucleic Acid
tttttataggctagctacaacgacattttat

SEQ ID NO: 5009 - DNA, 31 bp, Artificial Sequence
  Description of Artificial Sequence:  Enzymatic Nucleic Acid
catttttaggctagctacaacgaaccatttt

SEQ ID NO: 5010 - DNA, 31 bp, Artificial Sequence
  Description of Artificial Sequence:  Enzymatic Nucleic Acid
gtattccaggctagctacaacgattttatac

SEQ ID NO: 5011 - DNA, 31 bp, Artificial Sequence
  Description of Artificial Sequence:  Enzymatic Nucleic Acid
aaggggtaggctagctacaacgatccatttt

SEQ ID NO: 5012 - DNA, 31 bp, Artificial Sequence
  Description of Artificial Sequence:  Enzymatic Nucleic Acid
tcaaggggggctagctacaacgaattccatt

SEQ ID NO: 5013 - DNA, 31 bp, Artificial Sequence
  Description of Artificial Sequence:  Enzymatic Nucleic Acid
tgattggaggctagctacaacgatcaagggg

SEQ ID NO: 5014 - DNA, 31 bp, Artificial Sequence
  Description of Artificial Sequence:  Enzymatic Nucleic Acid
ttgtgtgaggctagctacaacgatggactca

SEQ ID NO: 5015 - DNA, 31 bp, Artificial Sequence
  Description of Artificial Sequence:  Enzymatic Nucleic Acid
taattgtgggctagctacaacgagattggac

SEQ ID NO: 5016 - DNA, 31 bp, Artificial Sequence
  Description of Artificial Sequence:  Enzymatic Nucleic Acid
tttaattgggctagctacaacgagtgattgg

SEQ ID NO: 5017 - DNA, 31 bp, Artificial Sequence
  Description of Artificial Sequence:  Enzymatic Nucleic Acid
cgctttaaggctagctacaacgatgtgtgat

SEQ ID NO: 5018 - DNA, 31 bp, Artificial Sequence
  Description of Artificial Sequence:  Enzymatic Nucleic Acid
atgccccgggctagctacaacgatttaattg

SEQ ID NO: 5019 - DNA, 31 bp, Artificial Sequence
  Description of Artificial Sequence:  Enzymatic Nucleic Acid
agtacatgggctagctacaacgacccgcttt

SEQ ID NO: 5020 - DNA, 31 bp, Artificial Sequence
  Description of Artificial Sequence:  Enzymatic Nucleic Acid
tcagtacaggctagctacaacgagccccgct

SEQ ID NO: 5021 - DNA, 31 bp, Artificial Sequence
  Description of Artificial Sequence:  Enzymatic Nucleic Acid
cgtcagtaggctagctacaacgaatgccccg

SEQ ID NO: 5022 - DNA, 31 bp, Artificial Sequence
  Description of Artificial Sequence:  Enzymatic Nucleic Acid
atcgtcagggctagctacaacgaacatgccc

SEQ ID NO: 5023 - DNA, 31 bp, Artificial Sequence
  Description of Artificial Sequence:  Enzymatic Nucleic Acid
cataatcgggctagctacaacgacagtacat

SEQ ID NO: 5024 - DNA, 31 bp, Artificial Sequence
  Description of Artificial Sequence:  Enzymatic Nucleic Acid
ttccataaggctagctacaacgacgtcagta

SEQ ID NO: 5025 - DNA, 31 bp, Artificial Sequence
  Description of Artificial Sequence:  Enzymatic Nucleic Acid
cacttccaggctagctacaacgaaatcgtca

SEQ ID NO: 5026 - DNA, 31 bp, Artificial Sequence
  Description of Artificial Sequence:  Enzymatic Nucleic Acid
ttcactcaggctagctacaacgattccataa

SEQ ID NO: 5027 - DNA, 31 bp, Artificial Sequence
  Description of Artificial Sequence:  Enzymatic Nucleic Acid
ctctttcaggctagctacaacgatcacttcc

SEQ ID NO: 5028 - DNA, 31 bp, Artificial Sequence
  Description of Artificial Sequence:  Enzymatic Nucleic Acid
ttcctgtgggctagctacaacgactctttca

SEQ ID NO: 5029 - DNA, 31 bp, Artificial Sequence
  Description of Artificial Sequence:  Enzymatic Nucleic Acid
atttcctgggctagctacaacgagtctcttt

SEQ ID NO: 5030 - DNA, 31 bp, Artificial Sequence
  Description of Artificial Sequence:  Enzymatic Nucleic Acid
cagtgtaaggctagctacaacgattcctgtg

SEQ ID NO: 5031 - DNA, 31 bp, Artificial Sequence
  Description of Artificial Sequence:  Enzymatic Nucleic Acid
tgacagtgggctagctacaacgaaatttcct

SEQ ID NO: 5032 - DNA, 31 bp, Artificial Sequence
  Description of Artificial Sequence:  Enzymatic Nucleic Acid
gatgacagggctagctacaacgagtaatttc

SEQ ID NO: 5033 - DNA, 31 bp, Artificial Sequence
  Description of Artificial Sequence:  Enzymatic Nucleic Acid
aaggatgaggctagctacaacgaagtgtaat

SEQ ID NO: 5034 - DNA, 31 bp, Artificial Sequence
  Description of Artificial Sequence:  Enzymatic Nucleic Acid
ggtaaggaggctagctacaacgagacagtgt

SEQ ID NO: 5035 - DNA, 31 bp, Artificial Sequence
  Description of Artificial Sequence:  Enzymatic Nucleic Acid
gggattggggctagctacaacgaaaggatga

SEQ ID NO: 5036 - DNA, 31 bp, Artificial Sequence
  Description of Artificial Sequence:  Enzymatic Nucleic Acid
aaatgggaggctagctacaacgatggtaagg

SEQ ID NO: 5037 - DNA, 31 bp, Artificial Sequence
  Description of Artificial Sequence:  Enzymatic Nucleic Acid
ctttgaaaggctagctacaacgagggattgg

SEQ ID NO: 5038 - DNA, 31 bp, Artificial Sequence
  Description of Artificial Sequence:  Enzymatic Nucleic Acid
tggctctgggctagctacaacgattctcctt

SEQ ID NO: 5039 - DNA, 31 bp, Artificial Sequence
  Description of Artificial Sequence:  Enzymatic Nucleic Acid
ccacatggggctagctacaacgatctgcttc

SEQ ID NO: 5040 - DNA, 31 bp, Artificial Sequence
  Description of Artificial Sequence:  Enzymatic Nucleic Acid
agaccacaggctagctacaacgaggctctgc

SEQ ID NO: 5041 - DNA, 31 bp, Artificial Sequence
  Description of Artificial Sequence:  Enzymatic Nucleic Acid
agagaccaggctagctacaacgaatggctct

SEQ ID NO: 5042 - DNA, 31 bp, Artificial Sequence
  Description of Artificial Sequence:  Enzymatic Nucleic Acid
cagagagaggctagctacaacgacacatggc

SEQ ID NO: 5043 - DNA, 31 bp, Artificial Sequence
  Description of Artificial Sequence:  Enzymatic Nucleic Acid
atacacaaggctagctacaacgacagagaga

SEQ ID NO: 5044 - DNA, 31 bp, Artificial Sequence
  Description of Artificial Sequence:  Enzymatic Nucleic Acid
gacatacaggctagctacaacgaaaccagag

SEQ ID NO: 5045 - DNA, 31 bp, Artificial Sequence
  Description of Artificial Sequence:  Enzymatic Nucleic Acid
gggacataggctagctacaacgaacaaccag

SEQ ID NO: 5046 - DNA, 31 bp, Artificial Sequence
  Description of Artificial Sequence:  Enzymatic Nucleic Acid
gtgggacaggctagctacaacgaacacaacc

SEQ ID NO: 5047 - DNA, 31 bp, Artificial Sequence
  Description of Artificial Sequence:  Enzymatic Nucleic Acid
gggtgggaggctagctacaacgaatacacaa

SEQ ID NO: 5048 - DNA, 31 bp, Artificial Sequence
  Description of Artificial Sequence:  Enzymatic Nucleic Acid
atctggggggctagctacaacgagggacata

SEQ ID NO: 5049 - DNA, 31 bp, Artificial Sequence
  Description of Artificial Sequence:  Enzymatic Nucleic Acid
ctcaccaaggctagctacaacgactggggtg

SEQ ID NO: 5050 - DNA, 31 bp, Artificial Sequence
  Description of Artificial Sequence:  Enzymatic Nucleic Acid
atttctcaggctagctacaacgacaatctgg

SEQ ID NO: 5051 - DNA, 31 bp, Artificial Sequence
  Description of Artificial Sequence:  Enzymatic Nucleic Acid
attagagaggctagctacaacgattctcacc

SEQ ID NO: 5052 - DNA, 31 bp, Artificial Sequence
  Description of Artificial Sequence:  Enzymatic Nucleic Acid
aggagagaggctagctacaacgatagagatt

SEQ ID NO: 5053 - DNA, 31 bp, Artificial Sequence
  Description of Artificial Sequence:  Enzymatic Nucleic Acid
ggaatccaggctagctacaacgaaggagaga

SEQ ID NO: 5054 - DNA, 31 bp, Artificial Sequence
  Description of Artificial Sequence:  Enzymatic Nucleic Acid
ggtaggaaggctagctacaacgaccacagga

SEQ ID NO: 5055 - DNA, 31 bp, Artificial Sequence
  Description of Artificial Sequence:  Enzymatic Nucleic Acid
cgtactggggctagctacaacgaaggaatcc

SEQ ID NO: 5056 - DNA, 31 bp, Artificial Sequence
  Description of Artificial Sequence:  Enzymatic Nucleic Acid
gtgccgtaggctagctacaacgatggtagga

SEQ ID NO: 5057 - DNA, 31 bp, Artificial Sequence
  Description of Artificial Sequence:  Enzymatic Nucleic Acid
tggtgccgggctagctacaacgaactggtag

SEQ ID NO: 5058 - DNA, 31 bp, Artificial Sequence
  Description of Artificial Sequence:  Enzymatic Nucleic Acid
gagtggtgggctagctacaacgacgtactgg

SEQ ID NO: 5059 - DNA, 31 bp, Artificial Sequence
  Description of Artificial Sequence:  Enzymatic Nucleic Acid
ttgagtggggctagctacaacgagccgtact

SEQ ID NO: 5060 - DNA, 31 bp, Artificial Sequence
  Description of Artificial Sequence:  Enzymatic Nucleic Acid
cgtttgagggctagctacaacgaggtgccgt

SEQ ID NO: 5061 - DNA, 31 bp, Artificial Sequence
  Description of Artificial Sequence:  Enzymatic Nucleic Acid
tgtcagcgggctagctacaacgattgagtgg

SEQ ID NO: 5062 - DNA, 31 bp, Artificial Sequence
  Description of Artificial Sequence:  Enzymatic Nucleic Acid
catgtcagggctagctacaacgagtttgagt

SEQ ID NO: 5063 - DNA, 31 bp, Artificial Sequence
  Description of Artificial Sequence:  Enzymatic Nucleic Acid
cgtacatgggctagctacaacgacagcgttt

SEQ ID NO: 5064 - DNA, 31 bp, Artificial Sequence
  Description of Artificial Sequence:  Enzymatic Nucleic Acid
accgtacaggctagctacaacgagtcagcgt

SEQ ID NO: 5065 - DNA, 31 bp, Artificial Sequence
  Description of Artificial Sequence:  Enzymatic Nucleic Acid
agaccgtaggctagctacaacgaatgtcagc

SEQ ID NO: 5066 - DNA, 31 bp, Artificial Sequence
  Description of Artificial Sequence:  Enzymatic Nucleic Acid
atagaccgggctagctacaacgaacatgtca

SEQ ID NO: 5067 - DNA, 31 bp, Artificial Sequence
  Description of Artificial Sequence:  Enzymatic Nucleic Acid
ggcatagaggctagctacaacgacgtacatg

SEQ ID NO: 5068 - DNA, 31 bp, Artificial Sequence
  Description of Artificial Sequence:  Enzymatic Nucleic Acid
gaatggcaggctagctacaacgaagaccgta

SEQ ID NO: 5069 - DNA, 31 bp, Artificial Sequence
  Description of Artificial Sequence:  Enzymatic Nucleic Acid
aggaatggggctagctacaacgaatagaccg

SEQ ID NO: 5070 - DNA, 31 bp, Artificial Sequence
  Description of Artificial Sequence:  Enzymatic Nucleic Acid
gggaggaaggctagctacaacgaggcataga

SEQ ID NO: 5071 - DNA, 31 bp, Artificial Sequence
  Description of Artificial Sequence:  Enzymatic Nucleic Acid
atgtgatgggctagctacaacgagggggagg

SEQ ID NO: 5072 - DNA, 31 bp, Artificial Sequence
  Description of Artificial Sequence:  Enzymatic Nucleic Acid
ggatgtgaggctagctacaacgagcggggga

SEQ ID NO: 5073 - DNA, 31 bp, Artificial Sequence
  Description of Artificial Sequence:  Enzymatic Nucleic Acid
agtggatgggctagctacaacgagatgcggg

SEQ ID NO: 5074 - DNA, 31 bp, Artificial Sequence
  Description of Artificial Sequence:  Enzymatic Nucleic Acid
ccagtggaggctagctacaacgagtgatgcg

SEQ ID NO: 5075 - DNA, 31 bp, Artificial Sequence
  Description of Artificial Sequence:  Enzymatic Nucleic Acid
aataccagggctagctacaacgaggatgtga

SEQ ID NO: 5076 - DNA, 31 bp, Artificial Sequence
  Description of Artificial Sequence:  Enzymatic Nucleic Acid
tgccaataggctagctacaacgacagtggat

SEQ ID NO: 5077 - DNA, 31 bp, Artificial Sequence
  Description of Artificial Sequence:  Enzymatic Nucleic Acid
actgccaaggctagctacaacgaaccagtgg

SEQ ID NO: 5078 - DNA, 31 bp, Artificial Sequence
  Description of Artificial Sequence:  Enzymatic Nucleic Acid
tccaactgggctagctacaacgacaatacca

SEQ ID NO: 5079 - DNA, 31 bp, Artificial Sequence
  Description of Artificial Sequence:  Enzymatic Nucleic Acid
tcctccaaggctagctacaacgatgccaata

SEQ ID NO: 5080 - DNA, 31 bp, Artificial Sequence
  Description of Artificial Sequence:  Enzymatic Nucleic Acid
ttggcgcaggctagctacaacgatcttcctc

SEQ ID NO: 5081 - DNA, 31 bp, Artificial Sequence
  Description of Artificial Sequence:  Enzymatic Nucleic Acid
cgttggcgggctagctacaacgaactcttcc

SEQ ID NO: 5082 - DNA, 31 bp, Artificial Sequence
  Description of Artificial Sequence:  Enzymatic Nucleic Acid
ctcgttggggctagctacaacgagcactctt

SEQ ID NO: 5083 - DNA, 31 bp, Artificial Sequence
  Description of Artificial Sequence:  Enzymatic Nucleic Acid
tgggctcgggctagctacaacgatggcgcac

SEQ ID NO: 5084 - DNA, 31 bp, Artificial Sequence
  Description of Artificial Sequence:  Enzymatic Nucleic Acid
tggctgggggctagctacaacgatcgttggc

SEQ ID NO: 5085 - DNA, 31 bp, Artificial Sequence
  Description of Artificial Sequence:  Enzymatic Nucleic Acid
cagcttggggctagctacaacgatgggctcg

SEQ ID NO: 5086 - DNA, 31 bp, Artificial Sequence
  Description of Artificial Sequence:  Enzymatic Nucleic Acid
tgagacagggctagctacaacgattggctgg

SEQ ID NO: 5087 - DNA, 31 bp, Artificial Sequence
  Description of Artificial Sequence:  Enzymatic Nucleic Acid
cactgagaggctagctacaacgaagcttggc

SEQ ID NO: 5088 - DNA, 31 bp, Artificial Sequence
  Description of Artificial Sequence:  Enzymatic Nucleic Acid
gtttgtcaggctagctacaacgatgagacag

SEQ ID NO: 5089 - DNA, 31 bp, Artificial Sequence
  Description of Artificial Sequence:  Enzymatic Nucleic Acid
tgggtttgggctagctacaacgacactgaga

SEQ ID NO: 5090 - DNA, 31 bp, Artificial Sequence
  Description of Artificial Sequence:  Enzymatic Nucleic Acid
ggtatgggggctagctacaacgattgtcact

SEQ ID NO: 5091 - DNA, 31 bp, Artificial Sequence
  Description of Artificial Sequence:  Enzymatic Nucleic Acid
caagggtaggctagctacaacgagggtttgt

SEQ ID NO: 5092 - DNA, 31 bp, Artificial Sequence
  Description of Artificial Sequence:  Enzymatic Nucleic Acid
cacaagggggctagctacaacgaatgggttt

SEQ ID NO: 5093 - DNA, 31 bp, Artificial Sequence
  Description of Artificial Sequence:  Enzymatic Nucleic Acid
attcttcaggctagctacaacgaaagggtat

SEQ ID NO: 5094 - DNA, 31 bp, Artificial Sequence
  Description of Artificial Sequence:  Enzymatic Nucleic Acid
cttctccaggctagctacaacgatcttcaca

SEQ ID NO: 5095 - DNA, 31 bp, Artificial Sequence
  Description of Artificial Sequence:  Enzymatic Nucleic Acid
cctccacaggctagctacaacgattctccat

SEQ ID NO: 5096 - DNA, 31 bp, Artificial Sequence
  Description of Artificial Sequence:  Enzymatic Nucleic Acid
gtcctccaggctagctacaacgaacttctcc

SEQ ID NO: 5097 - DNA, 31 bp, Artificial Sequence
  Description of Artificial Sequence:  Enzymatic Nucleic Acid
cctggaagggctagctacaacgacctccaca

SEQ ID NO: 5098 - DNA, 31 bp, Artificial Sequence
  Description of Artificial Sequence:  Enzymatic Nucleic Acid
caattttaggctagctacaacgattcctccc

SEQ ID NO: 5099 - DNA, 31 bp, Artificial Sequence
  Description of Artificial Sequence:  Enzymatic Nucleic Acid
aacttcaaggctagctacaacgatttatttc

SEQ ID NO: 5100 - DNA, 31 bp, Artificial Sequence
  Description of Artificial Sequence:  Enzymatic Nucleic Acid
tttattaaggctagctacaacgattcaattt

SEQ ID NO: 5101 - DNA, 31 bp, Artificial Sequence
  Description of Artificial Sequence:  Enzymatic Nucleic Acid
gatttttaggctagctacaacgataacttca

SEQ ID NO: 5102 - DNA, 31 bp, Artificial Sequence
  Description of Artificial Sequence:  Enzymatic Nucleic Acid
caaattgaggctagctacaacgattttatta

SEQ ID NO: 5103 - DNA, 31 bp, Artificial Sequence
  Description of Artificial Sequence:  Enzymatic Nucleic Acid
agagcaaaggctagctacaacgatgattttt

SEQ ID NO: 5104 - DNA, 31 bp, Artificial Sequence
  Description of Artificial Sequence:  Enzymatic Nucleic Acid
aattagagggctagctacaacgaaaattgat

SEQ ID NO: 5105 - DNA, 31 bp, Artificial Sequence
  Description of Artificial Sequence:  Enzymatic Nucleic Acid
tccttcaaggctagctacaacgatagagcaa

SEQ ID NO: 5106 - DNA, 31 bp, Artificial Sequence
  Description of Artificial Sequence:  Enzymatic Nucleic Acid
cagttttgggctagctacaacgatttttcct

SEQ ID NO: 5107 - DNA, 31 bp, Artificial Sequence
  Description of Artificial Sequence:  Enzymatic Nucleic Acid
acttacagggctagctacaacgatttgtttt

SEQ ID NO: 5108 - DNA, 31 bp, Artificial Sequence
  Description of Artificial Sequence:  Enzymatic Nucleic Acid
ggtacttaggctagctacaacgaagttttgt

SEQ ID NO: 5109 - DNA, 31 bp, Artificial Sequence
  Description of Artificial Sequence:  Enzymatic Nucleic Acid
caagggtaggctagctacaacgattacagtt

SEQ ID NO: 5110 - DNA, 31 bp, Artificial Sequence
  Description of Artificial Sequence:  Enzymatic Nucleic Acid
aacaagggggctagctacaacgaacttacag

SEQ ID NO: 5111 - DNA, 31 bp, Artificial Sequence
  Description of Artificial Sequence:  Enzymatic Nucleic Acid
ttggataaggctagctacaacgaaagggtac

SEQ ID NO: 5112 - DNA, 31 bp, Artificial Sequence
  Description of Artificial Sequence:  Enzymatic Nucleic Acid
cgcttggaggctagctacaacgaaacaaggg

SEQ ID NO: 5113 - DNA, 31 bp, Artificial Sequence
  Description of Artificial Sequence:  Enzymatic Nucleic Acid
atttgccgggctagctacaacgattggataa

SEQ ID NO: 5114 - DNA, 31 bp, Artificial Sequence
  Description of Artificial Sequence:  Enzymatic Nucleic Acid
cacatttgggctagctacaacgacgcttgga

SEQ ID NO: 5115 - DNA, 31 bp, Artificial Sequence
  Description of Artificial Sequence:  Enzymatic Nucleic Acid
ctgacacaggctagctacaacgattgccgct

SEQ ID NO: 5116 - DNA, 31 bp, Artificial Sequence
  Description of Artificial Sequence:  Enzymatic Nucleic Acid
agctgacaggctagctacaacgaatttgccg

SEQ ID NO: 5117 - DNA, 31 bp, Artificial Sequence
  Description of Artificial Sequence:  Enzymatic Nucleic Acid
aaagctgaggctagctacaacgaacatttgc

SEQ ID NO: 5118 - DNA, 31 bp, Artificial Sequence
  Description of Artificial Sequence:  Enzymatic Nucleic Acid
gtacaaagggctagctacaacgatgacacat

SEQ ID NO: 5119 - DNA, 31 bp, Artificial Sequence
  Description of Artificial Sequence:  Enzymatic Nucleic Acid
catttgtaggctagctacaacgaaaagctga

SEQ ID NO: 5120 - DNA, 31 bp, Artificial Sequence
  Description of Artificial Sequence:  Enzymatic Nucleic Acid
cacatttgggctagctacaacgaacaaagct

SEQ ID NO: 5121 - DNA, 31 bp, Artificial Sequence
  Description of Artificial Sequence:  Enzymatic Nucleic Acid
gcttcacaggctagctacaacgattgtacaa

SEQ ID NO: 5122 - DNA, 31 bp, Artificial Sequence
  Description of Artificial Sequence:  Enzymatic Nucleic Acid
ccgcttcaggctagctacaacgaatttgtac

SEQ ID NO: 5123 - DNA, 31 bp, Artificial Sequence
  Description of Artificial Sequence:  Enzymatic Nucleic Acid
gttgaccgggctagctacaacgattcacatt

SEQ ID NO: 5124 - DNA, 31 bp, Artificial Sequence
  Description of Artificial Sequence:  Enzymatic Nucleic Acid
tttgttgaggctagctacaacgacgcttcac

SEQ ID NO: 5125 - DNA, 31 bp, Artificial Sequence
  Description of Artificial Sequence:  Enzymatic Nucleic Acid
cgactttgggctagctacaacgatgaccgct

SEQ ID NO: 5126 - DNA, 31 bp, Artificial Sequence
  Description of Artificial Sequence:  Enzymatic Nucleic Acid
tctcccgaggctagctacaacgatttgttga

SEQ ID NO: 5127 - DNA, 31 bp, Artificial Sequence
  Description of Artificial Sequence:  Enzymatic Nucleic Acid
ggagatcaggctagctacaacgacctctctc

SEQ ID NO: 5128 - DNA, 31 bp, Artificial Sequence
  Description of Artificial Sequence:  Enzymatic Nucleic Acid
gaaggagaggctagctacaacgacaccctct

SEQ ID NO: 5129 - DNA, 31 bp, Artificial Sequence
  Description of Artificial Sequence:  Enzymatic Nucleic Acid
tggtcacgggctagctacaacgaggaaggag

SEQ ID NO: 5130 - DNA, 31 bp, Artificial Sequence
  Description of Artificial Sequence:  Enzymatic Nucleic Acid
cctggtcaggctagctacaacgagtggaagg

SEQ ID NO: 5131 - DNA, 31 bp, Artificial Sequence
  Description of Artificial Sequence:  Enzymatic Nucleic Acid
acccctggggctagctacaacgacacgtgga

SEQ ID NO: 5132 - DNA, 31 bp, Artificial Sequence
  Description of Artificial Sequence:  Enzymatic Nucleic Acid
tttcaggaggctagctacaacgaccctggtc

SEQ ID NO: 5133 - DNA, 31 bp, Artificial Sequence
  Description of Artificial Sequence:  Enzymatic Nucleic Acid
caaagtaaggctagctacaacgattcaggac

SEQ ID NO: 5134 - DNA, 31 bp, Artificial Sequence
  Description of Artificial Sequence:  Enzymatic Nucleic Acid
ttgcaaagggctagctacaacgaaatttcag

SEQ ID NO: 5135 - DNA, 31 bp, Artificial Sequence
  Description of Artificial Sequence:  Enzymatic Nucleic Acid
tcaggttgggctagctacaacgaaaagtaat

SEQ ID NO: 5136 - DNA, 31 bp, Artificial Sequence
  Description of Artificial Sequence:  Enzymatic Nucleic Acid
atgtcaggggctagctacaacgatgcaaagt

SEQ ID NO: 5137 - DNA, 31 bp, Artificial Sequence
  Description of Artificial Sequence:  Enzymatic Nucleic Acid
gctgcatgggctagctacaacgacaggttgc

SEQ ID NO: 5138 - DNA, 31 bp, Artificial Sequence
  Description of Artificial Sequence:  Enzymatic Nucleic Acid
gggctgcaggctagctacaacgagtcaggtt

SEQ ID NO: 5139 - DNA, 31 bp, Artificial Sequence
  Description of Artificial Sequence:  Enzymatic Nucleic Acid
gtgggctgggctagctacaacgaatgtcagg

SEQ ID NO: 5140 - DNA, 31 bp, Artificial Sequence
  Description of Artificial Sequence:  Enzymatic Nucleic Acid
tcagtgggggctagctacaacgatgcatgtc

SEQ ID NO: 5141 - DNA, 31 bp, Artificial Sequence
  Description of Artificial Sequence:  Enzymatic Nucleic Acid
ctgctcagggctagctacaacgagggctgca

SEQ ID NO: 5142 - DNA, 31 bp, Artificial Sequence
  Description of Artificial Sequence:  Enzymatic Nucleic Acid
ctctcctgggctagctacaacgatcagtggg

SEQ ID NO: 5143 - DNA, 31 bp, Artificial Sequence
  Description of Artificial Sequence:  Enzymatic Nucleic Acid
aagacacgggctagctacaacgatctcctgc

SEQ ID NO: 5144 - DNA, 31 bp, Artificial Sequence
  Description of Artificial Sequence:  Enzymatic Nucleic Acid
caaagacaggctagctacaacgagctctcct

SEQ ID NO: 5145 - DNA, 31 bp, Artificial Sequence
  Description of Artificial Sequence:  Enzymatic Nucleic Acid
cacaaagaggctagctacaacgaacgctctc

SEQ ID NO: 5146 - DNA, 31 bp, Artificial Sequence
  Description of Artificial Sequence:  Enzymatic Nucleic Acid
gtgcaccaggctagctacaacgaaaagacac

SEQ ID NO: 5147 - DNA, 31 bp, Artificial Sequence
  Description of Artificial Sequence:  Enzymatic Nucleic Acid
gcagtgcaggctagctacaacgacacaaaga

SEQ ID NO: 5148 - DNA, 31 bp, Artificial Sequence
  Description of Artificial Sequence:  Enzymatic Nucleic Acid
ctgcagtgggctagctacaacgaaccacaaa

SEQ ID NO: 5149 - DNA, 31 bp, Artificial Sequence
  Description of Artificial Sequence:  Enzymatic Nucleic Acid
gtctgcagggctagctacaacgagcaccaca

SEQ ID NO: 5150 - DNA, 31 bp, Artificial Sequence
  Description of Artificial Sequence:  Enzymatic Nucleic Acid
tctgtctgggctagctacaacgaagtgcacc

SEQ ID NO: 5151 - DNA, 31 bp, Artificial Sequence
  Description of Artificial Sequence:  Enzymatic Nucleic Acid
tagatctgggctagctacaacgactgcagtg

SEQ ID NO: 5152 - DNA, 31 bp, Artificial Sequence
  Description of Artificial Sequence:  Enzymatic Nucleic Acid
aacgtagaggctagctacaacgactgtctgc

SEQ ID NO: 5153 - DNA, 31 bp, Artificial Sequence
  Description of Artificial Sequence:  Enzymatic Nucleic Acid
ctcaaacgggctagctacaacgaagatctgt

SEQ ID NO: 5154 - DNA, 31 bp, Artificial Sequence
  Description of Artificial Sequence:  Enzymatic Nucleic Acid
ttctcaaaggctagctacaacgagtagatct

SEQ ID NO: 5155 - DNA, 31 bp, Artificial Sequence
  Description of Artificial Sequence:  Enzymatic Nucleic Acid
atgtgaggggctagctacaacgatctcaaac

SEQ ID NO: 5156 - DNA, 31 bp, Artificial Sequence
  Description of Artificial Sequence:  Enzymatic Nucleic Acid
gtaccatgggctagctacaacgagaggttct

SEQ ID NO: 5157 - DNA, 31 bp, Artificial Sequence
  Description of Artificial Sequence:  Enzymatic Nucleic Acid
ttgtaccaggctagctacaacgagtgaggtt

SEQ ID NO: 5158 - DNA, 31 bp, Artificial Sequence
  Description of Artificial Sequence:  Enzymatic Nucleic Acid
agcttgtaggctagctacaacgacatgtgag

SEQ ID NO: 5159 - DNA, 31 bp, Artificial Sequence
  Description of Artificial Sequence:  Enzymatic Nucleic Acid
caagcttgggctagctacaacgaaccatgtg

SEQ ID NO: 5160 - DNA, 31 bp, Artificial Sequence
  Description of Artificial Sequence:  Enzymatic Nucleic Acid
gggccaagggctagctacaacgattgtacca

SEQ ID NO: 5161 - DNA, 31 bp, Artificial Sequence
  Description of Artificial Sequence:  Enzymatic Nucleic Acid
gctgtgggggctagctacaacgacaagcttg

SEQ ID NO: 5162 - DNA, 31 bp, Artificial Sequence
  Description of Artificial Sequence:  Enzymatic Nucleic Acid
agaggctgggctagctacaacgagggccaag

SEQ ID NO: 5163 - DNA, 31 bp, Artificial Sequence
  Description of Artificial Sequence:  Enzymatic Nucleic Acid
ggcagaggggctagctacaacgatgtgggcc

SEQ ID NO: 5164 - DNA, 31 bp, Artificial Sequence
  Description of Artificial Sequence:  Enzymatic Nucleic Acid
tggattggggctagctacaacgaagaggctg

SEQ ID NO: 5165 - DNA, 31 bp, Artificial Sequence
  Description of Artificial Sequence:  Enzymatic Nucleic Acid
cacatggaggctagctacaacgatggcagag

SEQ ID NO: 5166 - DNA, 31 bp, Artificial Sequence
  Description of Artificial Sequence:  Enzymatic Nucleic Acid
ctcccacaggctagctacaacgaggattggc

SEQ ID NO: 5167 - DNA, 31 bp, Artificial Sequence
  Description of Artificial Sequence:  Enzymatic Nucleic Acid
ctctcccaggctagctacaacgaatggattg

SEQ ID NO: 5168 - DNA, 31 bp, Artificial Sequence
  Description of Artificial Sequence:  Enzymatic Nucleic Acid
gtgggcaaggctagctacaacgatctcccac

SEQ ID NO: 5169 - DNA, 31 bp, Artificial Sequence
  Description of Artificial Sequence:  Enzymatic Nucleic Acid
ggtgtgggggctagctacaacgaaactctcc

SEQ ID NO: 5170 - DNA, 31 bp, Artificial Sequence
  Description of Artificial Sequence:  Enzymatic Nucleic Acid
aacaggtgggctagctacaacgagggcaact

SEQ ID NO: 5171 - DNA, 31 bp, Artificial Sequence
  Description of Artificial Sequence:  Enzymatic Nucleic Acid
caaacaggggctagctacaacgagtgggcaa

SEQ ID NO: 5172 - DNA, 31 bp, Artificial Sequence
  Description of Artificial Sequence:  Enzymatic Nucleic Acid
cttgcaaaggctagctacaacgaaggtgtgg

SEQ ID NO: 5173 - DNA, 31 bp, Artificial Sequence
  Description of Artificial Sequence:  Enzymatic Nucleic Acid
agttcttgggctagctacaacgaaaacaggt

SEQ ID NO: 5174 - DNA, 31 bp, Artificial Sequence
  Description of Artificial Sequence:  Enzymatic Nucleic Acid
tatccaagggctagctacaacgatcttgcaa

SEQ ID NO: 5175 - DNA, 31 bp, Artificial Sequence
  Description of Artificial Sequence:  Enzymatic Nucleic Acid
aaagagtaggctagctacaacgaccaagttc

SEQ ID NO: 5176 - DNA, 31 bp, Artificial Sequence
  Description of Artificial Sequence:  Enzymatic Nucleic Acid
ccaaagagggctagctacaacgaatccaagt

SEQ ID NO: 5177 - DNA, 31 bp, Artificial Sequence
  Description of Artificial Sequence:  Enzymatic Nucleic Acid
gcattcaaggctagctacaacgattccaaag

SEQ ID NO: 5178 - DNA, 31 bp, Artificial Sequence
  Description of Artificial Sequence:  Enzymatic Nucleic Acid
tggtggcaggctagctacaacgatcaatttc

SEQ ID NO: 5179 - DNA, 31 bp, Artificial Sequence
  Description of Artificial Sequence:  Enzymatic Nucleic Acid
catggtggggctagctacaacgaattcaatt

SEQ ID NO: 5180 - DNA, 31 bp, Artificial Sequence
  Description of Artificial Sequence:  Enzymatic Nucleic Acid
gaacatggggctagctacaacgaggcattca

SEQ ID NO: 5181 - DNA, 31 bp, Artificial Sequence
  Description of Artificial Sequence:  Enzymatic Nucleic Acid
agagaacaggctagctacaacgaggtggcat

SEQ ID NO: 5182 - DNA, 31 bp, Artificial Sequence
  Description of Artificial Sequence:  Enzymatic Nucleic Acid
ttagagaaggctagctacaacgaatggtggc

SEQ ID NO: 5183 - DNA, 31 bp, Artificial Sequence
  Description of Artificial Sequence:  Enzymatic Nucleic Acid
ttgtgctaggctagctacaacgatagagaac

SEQ ID NO: 5184 - DNA, 31 bp, Artificial Sequence
  Description of Artificial Sequence:  Enzymatic Nucleic Acid
catttgtgggctagctacaacgatattagag

SEQ ID NO: 5185 - DNA, 31 bp, Artificial Sequence
  Description of Artificial Sequence:  Enzymatic Nucleic Acid
gtcatttgggctagctacaacgagctattag

SEQ ID NO: 5186 - DNA, 31 bp, Artificial Sequence
  Description of Artificial Sequence:  Enzymatic Nucleic Acid
aaatgtcaggctagctacaacgattgtgcta

SEQ ID NO: 5187 - DNA, 31 bp, Artificial Sequence
  Description of Artificial Sequence:  Enzymatic Nucleic Acid
tcaaaatgggctagctacaacgacatttgtg

SEQ ID NO: 5188 - DNA, 31 bp, Artificial Sequence
  Description of Artificial Sequence:  Enzymatic Nucleic Acid
gatcaaaaggctagctacaacgagtcatttg

SEQ ID NO: 5189 - DNA, 31 bp, Artificial Sequence
  Description of Artificial Sequence:  Enzymatic Nucleic Acid
ctccatgaggctagctacaacgacaaaatgt

SEQ ID NO: 5190 - DNA, 31 bp, Artificial Sequence
  Description of Artificial Sequence:  Enzymatic Nucleic Acid
aagctccaggctagctacaacgagatcaaaa

SEQ ID NO: 5191 - DNA, 31 bp, Artificial Sequence
  Description of Artificial Sequence:  Enzymatic Nucleic Acid
ttcttaagggctagctacaacgatccatgat

SEQ ID NO: 5192 - DNA, 31 bp, Artificial Sequence
  Description of Artificial Sequence:  Enzymatic Nucleic Acid
aggatgcaggctagctacaacgatcttaagc

SEQ ID NO: 5193 - DNA, 31 bp, Artificial Sequence
  Description of Artificial Sequence:  Enzymatic Nucleic Acid
caaggatgggctagctacaacgaattcttaa

SEQ ID NO: 5194 - DNA, 31 bp, Artificial Sequence
  Description of Artificial Sequence:  Enzymatic Nucleic Acid
tgcaaggaggctagctacaacgagcattctt

SEQ ID NO: 5195 - DNA, 31 bp, Artificial Sequence
  Description of Artificial Sequence:  Enzymatic Nucleic Acid
tggtcctgggctagctacaacgaaaggatgc

SEQ ID NO: 5196 - DNA, 31 bp, Artificial Sequence
  Description of Artificial Sequence:  Enzymatic Nucleic Acid
ctccttggggctagctacaacgacctgcaag

SEQ ID NO: 5197 - DNA, 31 bp, Artificial Sequence
  Description of Artificial Sequence:  Enzymatic Nucleic Acid
agacatagggctagctacaacgactccttgg

SEQ ID NO: 5198 - DNA, 31 bp, Artificial Sequence
  Description of Artificial Sequence:  Enzymatic Nucleic Acid
ggcagacaggctagctacaacgaagtctcct

SEQ ID NO: 5199 - DNA, 31 bp, Artificial Sequence
  Description of Artificial Sequence:  Enzymatic Nucleic Acid
aaggcagaggctagctacaacgaatagtctc

SEQ ID NO: 5200 - DNA, 31 bp, Artificial Sequence
  Description of Artificial Sequence:  Enzymatic Nucleic Acid
gagcaaggggctagctacaacgaagacatag

SEQ ID NO: 5201 - DNA, 31 bp, Artificial Sequence
  Description of Artificial Sequence:  Enzymatic Nucleic Acid
gtcttgagggctagctacaacgaaaggcaga

SEQ ID NO: 5202 - DNA, 31 bp, Artificial Sequence
  Description of Artificial Sequence:  Enzymatic Nucleic Acid
tcttcctgggctagctacaacgacttgagca

SEQ ID NO: 5203 - DNA, 31 bp, Artificial Sequence
  Description of Artificial Sequence:  Enzymatic Nucleic Acid
tttcttggggctagctacaacgacttcctgt

SEQ ID NO: 5204 - DNA, 31 bp, Artificial Sequence
  Description of Artificial Sequence:  Enzymatic Nucleic Acid
acgcaatgggctagctacaacgacttttctt

SEQ ID NO: 5205 - DNA, 31 bp, Artificial Sequence
  Description of Artificial Sequence:  Enzymatic Nucleic Acid
ccacgcaaggctagctacaacgagtcttttc

SEQ ID NO: 5206 - DNA, 31 bp, Artificial Sequence
  Description of Artificial Sequence:  Enzymatic Nucleic Acid
tgaccacgggctagctacaacgaaatgtctt

SEQ ID NO: 5207 - DNA, 31 bp, Artificial Sequence
  Description of Artificial Sequence:  Enzymatic Nucleic Acid
cctgaccaggctagctacaacgagcaatgtc

SEQ ID NO: 5208 - DNA, 31 bp, Artificial Sequence
  Description of Artificial Sequence:  Enzymatic Nucleic Acid
ctgcctgaggctagctacaacgacacgcaat

SEQ ID NO: 5209 - DNA, 31 bp, Artificial Sequence
  Description of Artificial Sequence:  Enzymatic Nucleic Acid
gtgagctgggctagctacaacgactgaccac

SEQ ID NO: 5210 - DNA, 31 bp, Artificial Sequence
  Description of Artificial Sequence:  Enzymatic Nucleic Acid
actgtgagggctagctacaacgatgcctgac

SEQ ID NO: 5211 - DNA, 31 bp, Artificial Sequence
  Description of Artificial Sequence:  Enzymatic Nucleic Acid
taggactgggctagctacaacgagagctgcc

SEQ ID NO: 5212 - DNA, 31 bp, Artificial Sequence
  Description of Artificial Sequence:  Enzymatic Nucleic Acid
ctctaggaggctagctacaacgatgtgagct

SEQ ID NO: 5213 - DNA, 31 bp, Artificial Sequence
  Description of Artificial Sequence:  Enzymatic Nucleic Acid
gccacacgggctagctacaacgatctaggac

SEQ ID NO: 5214 - DNA, 31 bp, Artificial Sequence
  Description of Artificial Sequence:  Enzymatic Nucleic Acid
gtgccacaggctagctacaacgagctctagg

SEQ ID NO: 5215 - DNA, 31 bp, Artificial Sequence
  Description of Artificial Sequence:  Enzymatic Nucleic Acid
gggtgccaggctagctacaacgaacgctcta

SEQ ID NO: 5216 - DNA, 31 bp, Artificial Sequence
  Description of Artificial Sequence:  Enzymatic Nucleic Acid
cgtgggtgggctagctacaacgacacacgct

SEQ ID NO: 5217 - DNA, 31 bp, Artificial Sequence
  Description of Artificial Sequence:  Enzymatic Nucleic Acid
atcgtgggggctagctacaacgagccacacg

SEQ ID NO: 5218 - DNA, 31 bp, Artificial Sequence
  Description of Artificial Sequence:  Enzymatic Nucleic Acid
tgtgatcgggctagctacaacgagggtgcca

SEQ ID NO: 5219 - DNA, 31 bp, Artificial Sequence
  Description of Artificial Sequence:  Enzymatic Nucleic Acid
tcctgtgaggctagctacaacgacgtgggtg

SEQ ID NO: 5220 - DNA, 31 bp, Artificial Sequence
  Description of Artificial Sequence:  Enzymatic Nucleic Acid
gtttcctgggctagctacaacgagatcgtgg

SEQ ID NO: 5221 - DNA, 31 bp, Artificial Sequence
  Description of Artificial Sequence:  Enzymatic Nucleic Acid
tctccaggggctagctacaacgattcctgtg

SEQ ID NO: 5222 - DNA, 31 bp, Artificial Sequence
  Description of Artificial Sequence:  Enzymatic Nucleic Acid
tcgtctgaggctagctacaacgatctccagg

SEQ ID NO: 5223 - DNA, 31 bp, Artificial Sequence
  Description of Artificial Sequence:  Enzymatic Nucleic Acid
acttgtcgggctagctacaacgactgattct

SEQ ID NO: 5224 - DNA, 31 bp, Artificial Sequence
  Description of Artificial Sequence:  Enzymatic Nucleic Acid
aatacttgggctagctacaacgacgtctgat

SEQ ID NO: 5225 - DNA, 31 bp, Artificial Sequence
  Description of Artificial Sequence:  Enzymatic Nucleic Acid
ccccaataggctagctacaacgattgtcgtc

SEQ ID NO: 5226 - DNA, 31 bp, Artificial Sequence
  Description of Artificial Sequence:  Enzymatic Nucleic Acid
ttccccaaggctagctacaacgaacttgtcg

SEQ ID NO: 5227 - DNA, 31 bp, Artificial Sequence
  Description of Artificial Sequence:  Enzymatic Nucleic Acid
cttcgatgggctagctacaacgatttcccca

SEQ ID NO: 5228 - DNA, 31 bp, Artificial Sequence
  Description of Artificial Sequence:  Enzymatic Nucleic Acid
gacttcgaggctagctacaacgagctttccc

SEQ ID NO: 5229 - DNA, 31 bp, Artificial Sequence
  Description of Artificial Sequence:  Enzymatic Nucleic Acid
gcatgagaggctagctacaacgattcgatgc

SEQ ID NO: 5230 - DNA, 31 bp, Artificial Sequence
  Description of Artificial Sequence:  Enzymatic Nucleic Acid
gccgtgcaggctagctacaacgagagacttc

SEQ ID NO: 5231 - DNA, 31 bp, Artificial Sequence
  Description of Artificial Sequence:  Enzymatic Nucleic Acid
atgccgtgggctagctacaacgaatgagact

SEQ ID NO: 5232 - DNA, 31 bp, Artificial Sequence
  Description of Artificial Sequence:  Enzymatic Nucleic Acid
agatgccgggctagctacaacgagcatgaga

SEQ ID NO: 5233 - DNA, 31 bp, Artificial Sequence
  Description of Artificial Sequence:  Enzymatic Nucleic Acid
cccagatgggctagctacaacgacgtgcatg

SEQ ID NO: 5234 - DNA, 31 bp, Artificial Sequence
  Description of Artificial Sequence:  Enzymatic Nucleic Acid
ttcccagaggctagctacaacgagccgtgca

SEQ ID NO: 5235 - DNA, 31 bp, Artificial Sequence
  Description of Artificial Sequence:  Enzymatic Nucleic Acid
gagggggaggctagctacaacgatcccagat

SEQ ID NO: 5236 - DNA, 31 bp, Artificial Sequence
  Description of Artificial Sequence:  Enzymatic Nucleic Acid
atgatctgggctagctacaacgaggaggggg

SEQ ID NO: 5237 - DNA, 31 bp, Artificial Sequence
  Description of Artificial Sequence:  Enzymatic Nucleic Acid
ccacatgaggctagctacaacgactgtggag

SEQ ID NO: 5238 - DNA, 31 bp, Artificial Sequence
  Description of Artificial Sequence:  Enzymatic Nucleic Acid
aaaccacaggctagctacaacgagatctgtg

SEQ ID NO: 5239 - DNA, 31 bp, Artificial Sequence
  Description of Artificial Sequence:  Enzymatic Nucleic Acid
ttaaaccaggctagctacaacgaatgatctg

SEQ ID NO: 5240 - DNA, 31 bp, Artificial Sequence
  Description of Artificial Sequence:  Enzymatic Nucleic Acid
tctttaaaggctagctacaacgacacatgat

SEQ ID NO: 5241 - DNA, 31 bp, Artificial Sequence
  Description of Artificial Sequence:  Enzymatic Nucleic Acid
tctcattaggctagctacaacgactttaaac

SEQ ID NO: 5242 - DNA, 31 bp, Artificial Sequence
  Description of Artificial Sequence:  Enzymatic Nucleic Acid
gggtctcaggctagctacaacgatatcttta

SEQ ID NO: 5243 - DNA, 31 bp, Artificial Sequence
  Description of Artificial Sequence:  Enzymatic Nucleic Acid
tacaagggggctagctacaacgactcattat

SEQ ID NO: 5244 - DNA, 31 bp, Artificial Sequence
  Description of Artificial Sequence:  Enzymatic Nucleic Acid
gtcttctaggctagctacaacgaaagggtct

SEQ ID NO: 5245 - DNA, 31 bp, Artificial Sequence
  Description of Artificial Sequence:  Enzymatic Nucleic Acid
tgcctgagggctagctacaacgacttctaca

SEQ ID NO: 5246 - DNA, 31 bp, Artificial Sequence
  Description of Artificial Sequence:  Enzymatic Nucleic Acid
atacaatgggctagctacaacgactgagtct

SEQ ID NO: 5247 - DNA, 31 bp, Artificial Sequence
  Description of Artificial Sequence:  Enzymatic Nucleic Acid
caatacaaggctagctacaacgagcctgagt

SEQ ID NO: 5248 - DNA, 31 bp, Artificial Sequence
  Description of Artificial Sequence:  Enzymatic Nucleic Acid
cttcaataggctagctacaacgaaatgcctg

SEQ ID NO: 5249 - DNA, 31 bp, Artificial Sequence
  Description of Artificial Sequence:  Enzymatic Nucleic Acid
tccttcaaggctagctacaacgaacaatgcc

SEQ ID NO: 5250 - DNA, 31 bp, Artificial Sequence
  Description of Artificial Sequence:  Enzymatic Nucleic Acid
ggttcccaggctagctacaacgaccttcaat

SEQ ID NO: 5251 - DNA, 31 bp, Artificial Sequence
  Description of Artificial Sequence:  Enzymatic Nucleic Acid
ggttccggggctagctacaacgatcccatcc

SEQ ID NO: 5252 - DNA, 31 bp, Artificial Sequence
  Description of Artificial Sequence:  Enzymatic Nucleic Acid
tagtgaggggctagctacaacgatccggttc

SEQ ID NO: 5253 - DNA, 31 bp, Artificial Sequence
  Description of Artificial Sequence:  Enzymatic Nucleic Acid
gcggatagggctagctacaacgagaggttcc

SEQ ID NO: 5254 - DNA, 31 bp, Artificial Sequence
  Description of Artificial Sequence:  Enzymatic Nucleic Acid
tctgcggaggctagctacaacgaagtgaggt

SEQ ID NO: 5255 - DNA, 31 bp, Artificial Sequence
  Description of Artificial Sequence:  Enzymatic Nucleic Acid
tcactctgggctagctacaacgaggatagtg

SEQ ID NO: 5256 - DNA, 31 bp, Artificial Sequence
  Description of Artificial Sequence:  Enzymatic Nucleic Acid
cttcctcaggctagctacaacgatctgcgga

SEQ ID NO: 5257 - DNA, 31 bp, Artificial Sequence
  Description of Artificial Sequence:  Enzymatic Nucleic Acid
ggccttcgggctagctacaacgacctccttc

SEQ ID NO: 5258 - DNA, 31 bp, Artificial Sequence
  Description of Artificial Sequence:  Enzymatic Nucleic Acid
tgtagaggggctagctacaacgacttcgtcc

SEQ ID NO: 5259 - DNA, 31 bp, Artificial Sequence
  Description of Artificial Sequence:  Enzymatic Nucleic Acid
ggcaggtgggctagctacaacgaagaggcct

SEQ ID NO: 5260 - DNA, 31 bp, Artificial Sequence
  Description of Artificial Sequence:  Enzymatic Nucleic Acid
ctggcaggggctagctacaacgagtagaggc

SEQ ID NO: 5261 - DNA, 31 bp, Artificial Sequence
  Description of Artificial Sequence:  Enzymatic Nucleic Acid
atgcctggggctagctacaacgaaggtgtag

SEQ ID NO: 5262 - DNA, 31 bp, Artificial Sequence
  Description of Artificial Sequence:  Enzymatic Nucleic Acid
actgcatgggctagctacaacgactggcagg

SEQ ID NO: 5263 - DNA, 31 bp, Artificial Sequence
  Description of Artificial Sequence:  Enzymatic Nucleic Acid
acactgcaggctagctacaacgagcctggca

SEQ ID NO: 5264 - DNA, 31 bp, Artificial Sequence
  Description of Artificial Sequence:  Enzymatic Nucleic Acid
gaacactgggctagctacaacgaatgcctgg

SEQ ID NO: 5265 - DNA, 31 bp, Artificial Sequence
  Description of Artificial Sequence:  Enzymatic Nucleic Acid
caagaacaggctagctacaacgatgcatgcc

SEQ ID NO: 5266 - DNA, 31 bp, Artificial Sequence
  Description of Artificial Sequence:  Enzymatic Nucleic Acid
gccaagaaggctagctacaacgaactgcatg

SEQ ID NO: 5267 - DNA, 31 bp, Artificial Sequence
  Description of Artificial Sequence:  Enzymatic Nucleic Acid
ttgcacagggctagctacaacgacaagaaca

SEQ ID NO: 5268 - DNA, 31 bp, Artificial Sequence
  Description of Artificial Sequence:  Enzymatic Nucleic Acid
cttttgcaggctagctacaacgaagccaaga

SEQ ID NO: 5269 - DNA, 31 bp, Artificial Sequence
  Description of Artificial Sequence:  Enzymatic Nucleic Acid
cacttttgggctagctacaacgaacagccaa

SEQ ID NO: 5270 - DNA, 31 bp, Artificial Sequence
  Description of Artificial Sequence:  Enzymatic Nucleic Acid
tgcctccaggctagctacaacgattttgcac

SEQ ID NO: 5271 - DNA, 31 bp, Artificial Sequence
  Description of Artificial Sequence:  Enzymatic Nucleic Acid
gaaaaatgggctagctacaacgactccactt

SEQ ID NO: 5272 - DNA, 31 bp, Artificial Sequence
  Description of Artificial Sequence:  Enzymatic Nucleic Acid
atgaaaaaggctagctacaacgagcctccac

SEQ ID NO: 5273 - DNA, 31 bp, Artificial Sequence
  Description of Artificial Sequence:  Enzymatic Nucleic Acid
ttctattaggctagctacaacgagaaaaatg

SEQ ID NO: 5274 - DNA, 31 bp, Artificial Sequence
  Description of Artificial Sequence:  Enzymatic Nucleic Acid
accttctaggctagctacaacgatatgaaaa

SEQ ID NO: 5275 - DNA, 31 bp, Artificial Sequence
  Description of Artificial Sequence:  Enzymatic Nucleic Acid
cctgggcaggctagctacaacgacttctatt

SEQ ID NO: 5276 - DNA, 31 bp, Artificial Sequence
  Description of Artificial Sequence:  Enzymatic Nucleic Acid
ttcctgggggctagctacaacgaaccttcta

SEQ ID NO: 5277 - DNA, 31 bp, Artificial Sequence
  Description of Artificial Sequence:  Enzymatic Nucleic Acid
caagttcgggctagctacaacgacttttcct

SEQ ID NO: 5278 - DNA, 31 bp, Artificial Sequence
  Description of Artificial Sequence:  Enzymatic Nucleic Acid
tttccaagggctagctacaacgatcgtcttt

SEQ ID NO: 5279 - DNA, 31 bp, Artificial Sequence
  Description of Artificial Sequence:  Enzymatic Nucleic Acid
aataatgaggctagctacaacgattccaagt

SEQ ID NO: 5280 - DNA, 31 bp, Artificial Sequence
  Description of Artificial Sequence:  Enzymatic Nucleic Acid
tagaataaggctagctacaacgagatttcca

SEQ ID NO: 5281 - DNA, 31 bp, Artificial Sequence
  Description of Artificial Sequence:  Enzymatic Nucleic Acid
tactagaaggctagctacaacgaaatgattt

SEQ ID NO: 5282 - DNA, 31 bp, Artificial Sequence
  Description of Artificial Sequence:  Enzymatic Nucleic Acid
cgtgcctaggctagctacaacgatagaataa

SEQ ID NO: 5283 - DNA, 31 bp, Artificial Sequence
  Description of Artificial Sequence:  Enzymatic Nucleic Acid
ccgccgtgggctagctacaacgactactaga

SEQ ID NO: 5284 - DNA, 31 bp, Artificial Sequence
  Description of Artificial Sequence:  Enzymatic Nucleic Acid
caccgccgggctagctacaacgagcctacta

SEQ ID NO: 5285 - DNA, 31 bp, Artificial Sequence
  Description of Artificial Sequence:  Enzymatic Nucleic Acid
aatcaccgggctagctacaacgacgtgccta

SEQ ID NO: 5286 - DNA, 31 bp, Artificial Sequence
  Description of Artificial Sequence:  Enzymatic Nucleic Acid
ggcaatcaggctagctacaacgacgccgtgc

SEQ ID NO: 5287 - DNA, 31 bp, Artificial Sequence
  Description of Artificial Sequence:  Enzymatic Nucleic Acid
catggcaaggctagctacaacgacaccgccg

SEQ ID NO: 5288 - DNA, 31 bp, Artificial Sequence
  Description of Artificial Sequence:  Enzymatic Nucleic Acid
gaacatggggctagctacaacgaaatcaccg

SEQ ID NO: 5289 - DNA, 31 bp, Artificial Sequence
  Description of Artificial Sequence:  Enzymatic Nucleic Acid
gaagaacaggctagctacaacgaggcaatca

SEQ ID NO: 5290 - DNA, 31 bp, Artificial Sequence
  Description of Artificial Sequence:  Enzymatic Nucleic Acid
cagaagaaggctagctacaacgaatggcaat

SEQ ID NO: 5291 - DNA, 31 bp, Artificial Sequence
  Description of Artificial Sequence:  Enzymatic Nucleic Acid
agaagtagggctagctacaacgacagaagaa

SEQ ID NO: 5292 - DNA, 31 bp, Artificial Sequence
  Description of Artificial Sequence:  Enzymatic Nucleic Acid
acaagaagggctagctacaacgaagccagaa

SEQ ID NO: 5293 - DNA, 31 bp, Artificial Sequence
  Description of Artificial Sequence:  Enzymatic Nucleic Acid
gatgatgaggctagctacaacgaaagaagta

SEQ ID NO: 5294 - DNA, 31 bp, Artificial Sequence
  Description of Artificial Sequence:  Enzymatic Nucleic Acid
taggatgaggctagctacaacgagacaagaa

SEQ ID NO: 5295 - DNA, 31 bp, Artificial Sequence
  Description of Artificial Sequence:  Enzymatic Nucleic Acid
ccgtaggaggctagctacaacgagatgacaa

SEQ ID NO: 5296 - DNA, 31 bp, Artificial Sequence
  Description of Artificial Sequence:  Enzymatic Nucleic Acid
acggtccgggctagctacaacgaaggatgat

SEQ ID NO: 5297 - DNA, 31 bp, Artificial Sequence
  Description of Artificial Sequence:  Enzymatic Nucleic Acid
cttaacggggctagctacaacgaccgtagga

SEQ ID NO: 5298 - DNA, 31 bp, Artificial Sequence
  Description of Artificial Sequence:  Enzymatic Nucleic Acid
ccgcttaaggctagctacaacgaggtccgta

SEQ ID NO: 5299 - DNA, 31 bp, Artificial Sequence
  Description of Artificial Sequence:  Enzymatic Nucleic Acid
ttggcccgggctagctacaacgattaacggt

SEQ ID NO: 5300 - DNA, 31 bp, Artificial Sequence
  Description of Artificial Sequence:  Enzymatic Nucleic Acid
tccattggggctagctacaacgaccgcttaa

SEQ ID NO: 5301 - DNA, 31 bp, Artificial Sequence
  Description of Artificial Sequence:  Enzymatic Nucleic Acid
cccctccaggctagctacaacgatggcccgc

SEQ ID NO: 5302 - DNA, 31 bp, Artificial Sequence
  Description of Artificial Sequence:  Enzymatic Nucleic Acid
gtcttcagggctagctacaacgatcccctcc

SEQ ID NO: 5303 - DNA, 31 bp, Artificial Sequence
  Description of Artificial Sequence:  Enzymatic Nucleic Acid
gtagcctgggctagctacaacgacttcagtt

SEQ ID NO: 5304 - DNA, 31 bp, Artificial Sequence
  Description of Artificial Sequence:  Enzymatic Nucleic Acid
acaagtagggctagctacaacgactgtcttc

SEQ ID NO: 5305 - DNA, 31 bp, Artificial Sequence
  Description of Artificial Sequence:  Enzymatic Nucleic Acid
tggacaagggctagctacaacgaagcctgtc

SEQ ID NO: 5306 - DNA, 31 bp, Artificial Sequence
  Description of Artificial Sequence:  Enzymatic Nucleic Acid
acgatggaggctagctacaacgaaagtagcc

SEQ ID NO: 5307 - DNA, 31 bp, Artificial Sequence
  Description of Artificial Sequence:  Enzymatic Nucleic Acid
catgacgaggctagctacaacgaggacaagt

SEQ ID NO: 5308 - DNA, 31 bp, Artificial Sequence
  Description of Artificial Sequence:  Enzymatic Nucleic Acid
atccatgaggctagctacaacgagatggaca

SEQ ID NO: 5309 - DNA, 31 bp, Artificial Sequence
  Description of Artificial Sequence:  Enzymatic Nucleic Acid
tggatccaggctagctacaacgagacgatgg

SEQ ID NO: 5310 - DNA, 31 bp, Artificial Sequence
  Description of Artificial Sequence:  Enzymatic Nucleic Acid
catctggaggctagctacaacgaccatgacg

SEQ ID NO: 5311 - DNA, 31 bp, Artificial Sequence
  Description of Artificial Sequence:  Enzymatic Nucleic Acid
ggagttcaggctagctacaacgactggatcc

SEQ ID NO: 5312 - DNA, 31 bp, Artificial Sequence
  Description of Artificial Sequence:  Enzymatic Nucleic Acid
aatgggagggctagctacaacgatcatctgg

SEQ ID NO: 5313 - DNA, 31 bp, Artificial Sequence
  Description of Artificial Sequence:  Enzymatic Nucleic Acid
tcatccaaggctagctacaacgagggagttc

SEQ ID NO: 5314 - DNA, 31 bp, Artificial Sequence
  Description of Artificial Sequence:  Enzymatic Nucleic Acid
aatgttcaggctagctacaacgaccaatggg

SEQ ID NO: 5315 - DNA, 31 bp, Artificial Sequence
  Description of Artificial Sequence:  Enzymatic Nucleic Acid
tcacaatgggctagctacaacgatcatccaa

SEQ ID NO: 5316 - DNA, 31 bp, Artificial Sequence
  Description of Artificial Sequence:  Enzymatic Nucleic Acid
gttcacaaggctagctacaacgagttcatcc

SEQ ID NO: 5317 - DNA, 31 bp, Artificial Sequence
  Description of Artificial Sequence:  Enzymatic Nucleic Acid
gtcgttcaggctagctacaacgaaatgttca

SEQ ID NO: 5318 - DNA, 31 bp, Artificial Sequence
  Description of Artificial Sequence:  Enzymatic Nucleic Acid
ggcagtcgggctagctacaacgatcacaatg

SEQ ID NO: 5319 - DNA, 31 bp, Artificial Sequence
  Description of Artificial Sequence:  Enzymatic Nucleic Acid
taaggcagggctagctacaacgacgttcaca

SEQ ID NO: 5320 - DNA, 31 bp, Artificial Sequence
  Description of Artificial Sequence:  Enzymatic Nucleic Acid
tcataaggggctagctacaacgaagtcgttc

SEQ ID NO: 5321 - DNA, 31 bp, Artificial Sequence
  Description of Artificial Sequence:  Enzymatic Nucleic Acid
tggcatcaggctagctacaacgaaaggcagt

SEQ ID NO: 5322 - DNA, 31 bp, Artificial Sequence
  Description of Artificial Sequence:  Enzymatic Nucleic Acid
tgctggcaggctagctacaacgacataaggc

SEQ ID NO: 5323 - DNA, 31 bp, Artificial Sequence
  Description of Artificial Sequence:  Enzymatic Nucleic Acid
tttgctggggctagctacaacgaatcataag

SEQ ID NO: 5324 - DNA, 31 bp, Artificial Sequence
  Description of Artificial Sequence:  Enzymatic Nucleic Acid
cccatttgggctagctacaacgatggcatca

SEQ ID NO: 5325 - DNA, 31 bp, Artificial Sequence
  Description of Artificial Sequence:  Enzymatic Nucleic Acid
aattcccaggctagctacaacgattgctggc

SEQ ID NO: 5326 - DNA, 31 bp, Artificial Sequence
  Description of Artificial Sequence:  Enzymatic Nucleic Acid
ctggggaaggctagctacaacgatcccattt

SEQ ID NO: 5327 - DNA, 31 bp, Artificial Sequence
  Description of Artificial Sequence:  Enzymatic Nucleic Acid
tcagccggggctagctacaacgactctgggg

SEQ ID NO: 5328 - DNA, 31 bp, Artificial Sequence
  Description of Artificial Sequence:  Enzymatic Nucleic Acid
agcttcagggctagctacaacgacggtctct

SEQ ID NO: 5329 - DNA, 31 bp, Artificial Sequence
  Description of Artificial Sequence:  Enzymatic Nucleic Acid
ttacctagggctagctacaacgattcagccg

SEQ ID NO: 5330 - DNA, 31 bp, Artificial Sequence
  Description of Artificial Sequence:  Enzymatic Nucleic Acid
gaggcttaggctagctacaacgactagcttc

SEQ ID NO: 5331 - DNA, 31 bp, Artificial Sequence
  Description of Artificial Sequence:  Enzymatic Nucleic Acid
ccaagaggggctagctacaacgattacctag

SEQ ID NO: 5332 - DNA, 31 bp, Artificial Sequence
  Description of Artificial Sequence:  Enzymatic Nucleic Acid
caccacggggctagctacaacgacaagaggc

SEQ ID NO: 5333 - DNA, 31 bp, Artificial Sequence
  Description of Artificial Sequence:  Enzymatic Nucleic Acid
aggcaccaggctagctacaacgaggccaaga

SEQ ID NO: 5334 - DNA, 31 bp, Artificial Sequence
  Description of Artificial Sequence:  Enzymatic Nucleic Acid
caaaggcaggctagctacaacgacacggcca

SEQ ID NO: 5335 - DNA, 31 bp, Artificial Sequence
  Description of Artificial Sequence:  Enzymatic Nucleic Acid
gccaaaggggctagctacaacgaaccacggc

SEQ ID NO: 5336 - DNA, 31 bp, Artificial Sequence
  Description of Artificial Sequence:  Enzymatic Nucleic Acid
tcacttggggctagctacaacgacaaaggca

SEQ ID NO: 5337 - DNA, 31 bp, Artificial Sequence
  Description of Artificial Sequence:  Enzymatic Nucleic Acid
ttcaatcaggctagctacaacgattggccaa

SEQ ID NO: 5338 - DNA, 31 bp, Artificial Sequence
  Description of Artificial Sequence:  Enzymatic Nucleic Acid
tgcttcaaggctagctacaacgacacttggc

SEQ ID NO: 5339 - DNA, 31 bp, Artificial Sequence
  Description of Artificial Sequence:  Enzymatic Nucleic Acid
ggcatctgggctagctacaacgattcaatca

SEQ ID NO: 5340 - DNA, 31 bp, Artificial Sequence
  Description of Artificial Sequence:  Enzymatic Nucleic Acid
caaaggcaggctagctacaacgactgcttca

SEQ ID NO: 5341 - DNA, 31 bp, Artificial Sequence
  Description of Artificial Sequence:  Enzymatic Nucleic Acid
tccaaaggggctagctacaacgaatctgctt

SEQ ID NO: 5342 - DNA, 31 bp, Artificial Sequence
  Description of Artificial Sequence:  Enzymatic Nucleic Acid
cttgtcaaggctagctacaacgatccaaagg

SEQ ID NO: 5343 - DNA, 31 bp, Artificial Sequence
  Description of Artificial Sequence:  Enzymatic Nucleic Acid
ctgtcttgggctagctacaacgacaattcca

SEQ ID NO: 5344 - DNA, 31 bp, Artificial Sequence
  Description of Artificial Sequence:  Enzymatic Nucleic Acid
agttgctgggctagctacaacgacttgtcaa

SEQ ID NO: 5345 - DNA, 31 bp, Artificial Sequence
  Description of Artificial Sequence:  Enzymatic Nucleic Acid
gcaagttgggctagctacaacgatgtcttgt

SEQ ID NO: 5346 - DNA, 31 bp, Artificial Sequence
  Description of Artificial Sequence:  Enzymatic Nucleic Acid
cctgcaagggctagctacaacgatgctgtct

SEQ ID NO: 5347 - DNA, 31 bp, Artificial Sequence
  Description of Artificial Sequence:  Enzymatic Nucleic Acid
ctgtcctgggctagctacaacgaaagttgct

SEQ ID NO: 5348 - DNA, 31 bp, Artificial Sequence
  Description of Artificial Sequence:  Enzymatic Nucleic Acid
tgctactgggctagctacaacgacctgcaag

SEQ ID NO: 5349 - DNA, 31 bp, Artificial Sequence
  Description of Artificial Sequence:  Enzymatic Nucleic Acid
gactgctaggctagctacaacgatgtcctgc

SEQ ID NO: 5350 - DNA, 31 bp, Artificial Sequence
  Description of Artificial Sequence:  Enzymatic Nucleic Acid
tttgactgggctagctacaacgatactgtcc

SEQ ID NO: 5351 - DNA, 31 bp, Artificial Sequence
  Description of Artificial Sequence:  Enzymatic Nucleic Acid
cattttgaggctagctacaacgatgctactg

SEQ ID NO: 5352 - DNA, 31 bp, Artificial Sequence
  Description of Artificial Sequence:  Enzymatic Nucleic Acid
tttcaacaggctagctacaacgatttgactg

SEQ ID NO: 5353 - DNA, 31 bp, Artificial Sequence
  Description of Artificial Sequence:  Enzymatic Nucleic Acid
tctttcaaggctagctacaacgaattttgac

SEQ ID NO: 5354 - DNA, 31 bp, Artificial Sequence
  Description of Artificial Sequence:  Enzymatic Nucleic Acid
gtgtgttgggctagctacaacgatccttctt

SEQ ID NO: 5355 - DNA, 31 bp, Artificial Sequence
  Description of Artificial Sequence:  Enzymatic Nucleic Acid
actgtgtgggctagctacaacgatgctcctt

SEQ ID NO: 5356 - DNA, 31 bp, Artificial Sequence
  Description of Artificial Sequence:  Enzymatic Nucleic Acid
tcactgtgggctagctacaacgagttgctcc

SEQ ID NO: 5357 - DNA, 31 bp, Artificial Sequence
  Description of Artificial Sequence:  Enzymatic Nucleic Acid
gctcactgggctagctacaacgagtgttgct

SEQ ID NO: 5358 - DNA, 31 bp, Artificial Sequence
  Description of Artificial Sequence:  Enzymatic Nucleic Acid
gatgctcaggctagctacaacgatgtgtgtt

SEQ ID NO: 5359 - DNA, 31 bp, Artificial Sequence
  Description of Artificial Sequence:  Enzymatic Nucleic Acid
gctcgatgggctagctacaacgatcactgtg

SEQ ID NO: 5360 - DNA, 31 bp, Artificial Sequence
  Description of Artificial Sequence:  Enzymatic Nucleic Acid
gagctcgaggctagctacaacgagctcactg

SEQ ID NO: 5361 - DNA, 31 bp, Artificial Sequence
  Description of Artificial Sequence:  Enzymatic Nucleic Acid
catgagagggctagctacaacgatcgatgct

SEQ ID NO: 5362 - DNA, 31 bp, Artificial Sequence
  Description of Artificial Sequence:  Enzymatic Nucleic Acid
ttcagacaggctagctacaacgagagagctc

SEQ ID NO: 5363 - DNA, 31 bp, Artificial Sequence
  Description of Artificial Sequence:  Enzymatic Nucleic Acid
agttcagaggctagctacaacgaatgagagc

SEQ ID NO: 5364 - DNA, 31 bp, Artificial Sequence
  Description of Artificial Sequence:  Enzymatic Nucleic Acid
atcttgagggctagctacaacgatcagacat

SEQ ID NO: 5365 - DNA, 31 bp, Artificial Sequence
  Description of Artificial Sequence:  Enzymatic Nucleic Acid
aatgaggaggctagctacaacgacttgagtt

SEQ ID NO: 5366 - DNA, 31 bp, Artificial Sequence
  Description of Artificial Sequence:  Enzymatic Nucleic Acid
aatatgaaggctagctacaacgagaggatct

SEQ ID NO: 5367 - DNA, 31 bp, Artificial Sequence
  Description of Artificial Sequence:  Enzymatic Nucleic Acid
gaccaataggctagctacaacgagaatgagg

SEQ ID NO: 5368 - DNA, 31 bp, Artificial Sequence
  Description of Artificial Sequence:  Enzymatic Nucleic Acid
gtgaccaaggctagctacaacgaatgaatga

SEQ ID NO: 5369 - DNA, 31 bp, Artificial Sequence
  Description of Artificial Sequence:  Enzymatic Nucleic Acid
gatggtgaggctagctacaacgacaatatga

SEQ ID NO: 5370 - DNA, 31 bp, Artificial Sequence
  Description of Artificial Sequence:  Enzymatic Nucleic Acid
tgagatggggctagctacaacgagaccaata

SEQ ID NO: 5371 - DNA, 31 bp, Artificial Sequence
  Description of Artificial Sequence:  Enzymatic Nucleic Acid
cattgagaggctagctacaacgaggtgacca

SEQ ID NO: 5372 - DNA, 31 bp, Artificial Sequence
  Description of Artificial Sequence:  Enzymatic Nucleic Acid
tgaccacaggctagctacaacgatgagatgg

SEQ ID NO: 5373 - DNA, 31 bp, Artificial Sequence
  Description of Artificial Sequence:  Enzymatic Nucleic Acid
gttgaccaggctagctacaacgaattgagat

SEQ ID NO: 5374 - DNA, 31 bp, Artificial Sequence
  Description of Artificial Sequence:  Enzymatic Nucleic Acid
aaggttgaggctagctacaacgacacattga

SEQ ID NO: 5375 - DNA, 31 bp, Artificial Sequence
  Description of Artificial Sequence:  Enzymatic Nucleic Acid
ctagaaggggctagctacaacgatgaccaca

SEQ ID NO: 5376 - DNA, 31 bp, Artificial Sequence
  Description of Artificial Sequence:  Enzymatic Nucleic Acid
tacaggcaggctagctacaacgactagaagg

SEQ ID NO: 5377 - DNA, 31 bp, Artificial Sequence
  Description of Artificial Sequence:  Enzymatic Nucleic Acid
ggtacaggggctagctacaacgaacctagaa

SEQ ID NO: 5378 - DNA, 31 bp, Artificial Sequence
  Description of Artificial Sequence:  Enzymatic Nucleic Acid
gcttggtaggctagctacaacgaaggcacct

SEQ ID NO: 5379 - DNA, 31 bp, Artificial Sequence
  Description of Artificial Sequence:  Enzymatic Nucleic Acid
tggcttggggctagctacaacgaacaggcac

SEQ ID NO: 5380 - DNA, 31 bp, Artificial Sequence
  Description of Artificial Sequence:  Enzymatic Nucleic Acid
cctcctggggctagctacaacgattggtaca

SEQ ID NO: 5381 - DNA, 31 bp, Artificial Sequence
  Description of Artificial Sequence:  Enzymatic Nucleic Acid
atgagtggggctagctacaacgacctcctgg

SEQ ID NO: 5382 - DNA, 31 bp, Artificial Sequence
  Description of Artificial Sequence:  Enzymatic Nucleic Acid
accatgagggctagctacaacgaggccctcc

SEQ ID NO: 5383 - DNA, 31 bp, Artificial Sequence
  Description of Artificial Sequence:  Enzymatic Nucleic Acid
aatcaccaggctagctacaacgagagtggcc

SEQ ID NO: 5384 - DNA, 31 bp, Artificial Sequence
  Description of Artificial Sequence:  Enzymatic Nucleic Acid
cacaatcaggctagctacaacgacatgagtg

SEQ ID NO: 5385 - DNA, 31 bp, Artificial Sequence
  Description of Artificial Sequence:  Enzymatic Nucleic Acid
ttccacaaggctagctacaacgacaccatga

SEQ ID NO: 5386 - DNA, 31 bp, Artificial Sequence
  Description of Artificial Sequence:  Enzymatic Nucleic Acid
gaattccaggctagctacaacgaaatcacca

SEQ ID NO: 5387 - DNA, 31 bp, Artificial Sequence
  Description of Artificial Sequence:  Enzymatic Nucleic Acid
ttgcagaaggctagctacaacgatccacaat

SEQ ID NO: 5388 - DNA, 31 bp, Artificial Sequence
  Description of Artificial Sequence:  Enzymatic Nucleic Acid
caaatttgggctagctacaacgaagaattcc

SEQ ID NO: 5389 - DNA, 31 bp, Artificial Sequence
  Description of Artificial Sequence:  Enzymatic Nucleic Acid
tttccaaaggctagctacaacgattgcagaa

SEQ ID NO: 5390 - DNA, 31 bp, Artificial Sequence
  Description of Artificial Sequence:  Enzymatic Nucleic Acid
tggacaggggctagctacaacgattccaaat

SEQ ID NO: 5391 - DNA, 31 bp, Artificial Sequence
  Description of Artificial Sequence:  Enzymatic Nucleic Acid
taagtggaggctagctacaacgaaggtttcc

SEQ ID NO: 5392 - DNA, 31 bp, Artificial Sequence
  Description of Artificial Sequence:  Enzymatic Nucleic Acid
caggtaagggctagctacaacgaggacaggt

SEQ ID NO: 5393 - DNA, 31 bp, Artificial Sequence
  Description of Artificial Sequence:  Enzymatic Nucleic Acid
tcctcaggggctagctacaacgaaagtggac

SEQ ID NO: 5394 - DNA, 31 bp, Artificial Sequence
  Description of Artificial Sequence:  Enzymatic Nucleic Acid
ttctcttgggctagctacaacgatcctcagg

SEQ ID NO: 5395 - DNA, 31 bp, Artificial Sequence
  Description of Artificial Sequence:  Enzymatic Nucleic Acid
caaattcaggctagctacaacgattctcttg

SEQ ID NO: 5396 - DNA, 31 bp, Artificial Sequence
  Description of Artificial Sequence:  Enzymatic Nucleic Acid
gggacaaaggctagctacaacgatcatttct

SEQ ID NO: 5397 - DNA, 31 bp, Artificial Sequence
  Description of Artificial Sequence:  Enzymatic Nucleic Acid
gtaggggaggctagctacaacgaaaattcat

SEQ ID NO: 5398 - DNA, 31 bp, Artificial Sequence
  Description of Artificial Sequence:  Enzymatic Nucleic Acid
tggtcttgggctagctacaacgaaggggaca

SEQ ID NO: 5399 - DNA, 31 bp, Artificial Sequence
  Description of Artificial Sequence:  Enzymatic Nucleic Acid
ccctttggggctagctacaacgacttgtagg

SEQ ID NO: 5400 - DNA, 31 bp, Artificial Sequence
  Description of Artificial Sequence:  Enzymatic Nucleic Acid
gaatcgtgggctagctacaacgaccctttgg

SEQ ID NO: 5401 - DNA, 31 bp, Artificial Sequence
  Description of Artificial Sequence:  Enzymatic Nucleic Acid
cggaatcgggctagctacaacgagccccttt

SEQ ID NO: 5402 - DNA, 31 bp, Artificial Sequence
  Description of Artificial Sequence:  Enzymatic Nucleic Acid
tgacggaaggctagctacaacgacgtgcccc

SEQ ID NO: 5403 - DNA, 31 bp, Artificial Sequence
  Description of Artificial Sequence:  Enzymatic Nucleic Acid
tcccttgaggctagctacaacgaggaatcgt

SEQ ID NO: 5404 - DNA, 31 bp, Artificial Sequence
  Description of Artificial Sequence:  Enzymatic Nucleic Acid
caacgtagggctagctacaacgactttccct

SEQ ID NO: 5405 - DNA, 31 bp, Artificial Sequence
  Description of Artificial Sequence:  Enzymatic Nucleic Acid
ctccaacgggctagctacaacgaagtctttc

SEQ ID NO: 5406 - DNA, 31 bp, Artificial Sequence
  Description of Artificial Sequence:  Enzymatic Nucleic Acid
tgctccaaggctagctacaacgagtagtctt

SEQ ID NO: 5407 - DNA, 31 bp, Artificial Sequence
  Description of Artificial Sequence:  Enzymatic Nucleic Acid
agggattgggctagctacaacgatccaacgt

SEQ ID NO: 5408 - DNA, 31 bp, Artificial Sequence
  Description of Artificial Sequence:  Enzymatic Nucleic Acid
cacagggaggctagctacaacgatgctccaa

SEQ ID NO: 5409 - DNA, 31 bp, Artificial Sequence
  Description of Artificial Sequence:  Enzymatic Nucleic Acid
cagatccaggctagctacaacgaagggattg

SEQ ID NO: 5410 - DNA, 31 bp, Artificial Sequence
  Description of Artificial Sequence:  Enzymatic Nucleic Acid
gtttcagaggctagctacaacgaccacaggg

SEQ ID NO: 5411 - DNA, 31 bp, Artificial Sequence
  Description of Artificial Sequence:  Enzymatic Nucleic Acid
aagcgccgggctagctacaacgattcagatc

SEQ ID NO: 5412 - DNA, 31 bp, Artificial Sequence
  Description of Artificial Sequence:  Enzymatic Nucleic Acid
tccaagcgggctagctacaacgacgtttcag

SEQ ID NO: 5413 - DNA, 31 bp, Artificial Sequence
  Description of Artificial Sequence:  Enzymatic Nucleic Acid
tgtccaagggctagctacaacgagccgtttc

SEQ ID NO: 5414 - DNA, 31 bp, Artificial Sequence
  Description of Artificial Sequence:  Enzymatic Nucleic Acid
tgatgctgggctagctacaacgaccaagcgc

SEQ ID NO: 5415 - DNA, 31 bp, Artificial Sequence
  Description of Artificial Sequence:  Enzymatic Nucleic Acid
tggtgatgggctagctacaacgatgtccaag

SEQ ID NO: 5416 - DNA, 31 bp, Artificial Sequence
  Description of Artificial Sequence:  Enzymatic Nucleic Acid
actggtgaggctagctacaacgagctgtcca

SEQ ID NO: 5417 - DNA, 31 bp, Artificial Sequence
  Description of Artificial Sequence:  Enzymatic Nucleic Acid
gctactggggctagctacaacgagatgctgt

SEQ ID NO: 5418 - DNA, 31 bp, Artificial Sequence
  Description of Artificial Sequence:  Enzymatic Nucleic Acid
tctggctaggctagctacaacgatggtgatg

SEQ ID NO: 5419 - DNA, 31 bp, Artificial Sequence
  Description of Artificial Sequence:  Enzymatic Nucleic Acid
agctctggggctagctacaacgatactggtg

SEQ ID NO: 5420 - DNA, 31 bp, Artificial Sequence
  Description of Artificial Sequence:  Enzymatic Nucleic Acid
tggctgagggctagctacaacgatctggcta

SEQ ID NO: 5421 - DNA, 31 bp, Artificial Sequence
  Description of Artificial Sequence:  Enzymatic Nucleic Acid
agagctggggctagctacaacgatgagctct

SEQ ID NO: 5422 - DNA, 31 bp, Artificial Sequence
  Description of Artificial Sequence:  Enzymatic Nucleic Acid
atccagagggctagctacaacgatggctgag

SEQ ID NO: 5423 - DNA, 31 bp, Artificial Sequence
  Description of Artificial Sequence:  Enzymatic Nucleic Acid
tccacaaaggctagctacaacgaccagagct

SEQ ID NO: 5424 - DNA, 31 bp, Artificial Sequence
  Description of Artificial Sequence:  Enzymatic Nucleic Acid
ctcctccaggctagctacaacgaaaatccag

SEQ ID NO: 5425 - DNA, 31 bp, Artificial Sequence
  Description of Artificial Sequence:  Enzymatic Nucleic Acid
ctgagggaggctagctacaacgattctcctc

SEQ ID NO: 5426 - DNA, 31 bp, Artificial Sequence
  Description of Artificial Sequence:  Enzymatic Nucleic Acid
ctacatcaggctagctacaacgatgagggac

SEQ ID NO: 5427 - DNA, 31 bp, Artificial Sequence
  Description of Artificial Sequence:  Enzymatic Nucleic Acid
cttctacaggctagctacaacgacactgagg

SEQ ID NO: 5428 - DNA, 31 bp, Artificial Sequence
  Description of Artificial Sequence:  Enzymatic Nucleic Acid
ttcttctaggctagctacaacgaatcactga

SEQ ID NO: 5429 - DNA, 31 bp, Artificial Sequence
  Description of Artificial Sequence:  Enzymatic Nucleic Acid
ttcaggagggctagctacaacgattcctctt

SEQ ID NO: 5430 - DNA, 31 bp, Artificial Sequence
  Description of Artificial Sequence:  Enzymatic Nucleic Acid
tatacagaggctagctacaacgacttcagga

SEQ ID NO: 5431 - DNA, 31 bp, Artificial Sequence
  Description of Artificial Sequence:  Enzymatic Nucleic Acid
tccttataggctagctacaacgaagatcttc

SEQ ID NO: 5432 - DNA, 31 bp, Artificial Sequence
  Description of Artificial Sequence:  Enzymatic Nucleic Acid
agtccttaggctagctacaacgaacagatct

SEQ ID NO: 5433 - DNA, 31 bp, Artificial Sequence
  Description of Artificial Sequence:  Enzymatic Nucleic Acid
tcaggaagggctagctacaacgaccttatac

SEQ ID NO: 5434 - DNA, 31 bp, Artificial Sequence
  Description of Artificial Sequence:  Enzymatic Nucleic Acid
ctccaaggggctagctacaacgacaggaagt

SEQ ID NO: 5435 - DNA, 31 bp, Artificial Sequence
  Description of Artificial Sequence:  Enzymatic Nucleic Acid
atgagatgggctagctacaacgatccaaggt

SEQ ID NO: 5436 - DNA, 31 bp, Artificial Sequence
  Description of Artificial Sequence:  Enzymatic Nucleic Acid
agatgagaggctagctacaacgagctccaag

SEQ ID NO: 5437 - DNA, 31 bp, Artificial Sequence
  Description of Artificial Sequence:  Enzymatic Nucleic Acid
gtaacagaggctagctacaacgagagatgct

SEQ ID NO: 5438 - DNA, 31 bp, Artificial Sequence
  Description of Artificial Sequence:  Enzymatic Nucleic Acid
agctgtaaggctagctacaacgaagatgaga

SEQ ID NO: 5439 - DNA, 31 bp, Artificial Sequence
  Description of Artificial Sequence:  Enzymatic Nucleic Acid
ggaagctgggctagctacaacgaaacagatg

SEQ ID NO: 5440 - DNA, 31 bp, Artificial Sequence
  Description of Artificial Sequence:  Enzymatic Nucleic Acid
cttggaagggctagctacaacgatgtaacag

SEQ ID NO: 5441 - DNA, 31 bp, Artificial Sequence
  Description of Artificial Sequence:  Enzymatic Nucleic Acid
cttagccaggctagctacaacgattggaagc

SEQ ID NO: 5442 - DNA, 31 bp, Artificial Sequence
  Description of Artificial Sequence:  Enzymatic Nucleic Acid
gcccttagggctagctacaacgacacttgga

SEQ ID NO: 5443 - DNA, 31 bp, Artificial Sequence
  Description of Artificial Sequence:  Enzymatic Nucleic Acid
actccatgggctagctacaacgaccttagcc

SEQ ID NO: 5444 - DNA, 31 bp, Artificial Sequence
  Description of Artificial Sequence:  Enzymatic Nucleic Acid
gaactccaggctagctacaacgagcccttag

SEQ ID NO: 5445 - DNA, 31 bp, Artificial Sequence
  Description of Artificial Sequence:  Enzymatic Nucleic Acid
gccaagaaggctagctacaacgatccatgcc

SEQ ID NO: 5446 - DNA, 31 bp, Artificial Sequence
  Description of Artificial Sequence:  Enzymatic Nucleic Acid
tcgcgatgggctagctacaacgacaagaact

SEQ ID NO: 5447 - DNA, 31 bp, Artificial Sequence
  Description of Artificial Sequence:  Enzymatic Nucleic Acid
tttcgcgaggctagctacaacgagccaagaa

SEQ ID NO: 5448 - DNA, 31 bp, Artificial Sequence
  Description of Artificial Sequence:  Enzymatic Nucleic Acid
cactttcgggctagctacaacgagatgccaa

SEQ ID NO: 5449 - DNA, 31 bp, Artificial Sequence
  Description of Artificial Sequence:  Enzymatic Nucleic Acid
tggatacaggctagctacaacgatttcgcga

SEQ ID NO: 5450 - DNA, 31 bp, Artificial Sequence
  Description of Artificial Sequence:  Enzymatic Nucleic Acid
tgtggataggctagctacaacgaactttcgc

SEQ ID NO: 5451 - DNA, 31 bp, Artificial Sequence
  Description of Artificial Sequence:  Enzymatic Nucleic Acid
cctgtggaggctagctacaacgaacactttc

SEQ ID NO: 5452 - DNA, 31 bp, Artificial Sequence
  Description of Artificial Sequence:  Enzymatic Nucleic Acid
ggtccctgggctagctacaacgaggatacac

SEQ ID NO: 5453 - DNA, 31 bp, Artificial Sequence
  Description of Artificial Sequence:  Enzymatic Nucleic Acid
ccgccaggggctagctacaacgaccctgtgg

SEQ ID NO: 5454 - DNA, 31 bp, Artificial Sequence
  Description of Artificial Sequence:  Enzymatic Nucleic Acid
tcgtgccgggctagctacaacgacaggtccc

SEQ ID NO: 5455 - DNA, 31 bp, Artificial Sequence
  Description of Artificial Sequence:  Enzymatic Nucleic Acid
atttcgtgggctagctacaacgacgccaggt

SEQ ID NO: 5456 - DNA, 31 bp, Artificial Sequence
  Description of Artificial Sequence:  Enzymatic Nucleic Acid
atatttcgggctagctacaacgagccgccag

SEQ ID NO: 5457 - DNA, 31 bp, Artificial Sequence
  Description of Artificial Sequence:  Enzymatic Nucleic Acid
agaggataggctagctacaacgattcgtgcc

SEQ ID NO: 5458 - DNA, 31 bp, Artificial Sequence
  Description of Artificial Sequence:  Enzymatic Nucleic Acid
taagaggaggctagctacaacgaatttcgtg

SEQ ID NO: 5459 - DNA, 31 bp, Artificial Sequence
  Description of Artificial Sequence:  Enzymatic Nucleic Acid
ttctccgaggctagctacaacgaaagaggat

SEQ ID NO: 5460 - DNA, 31 bp, Artificial Sequence
  Description of Artificial Sequence:  Enzymatic Nucleic Acid
taaccacgggctagctacaacgatcttctcc

SEQ ID NO: 5461 - DNA, 31 bp, Artificial Sequence
  Description of Artificial Sequence:  Enzymatic Nucleic Acid
tttaaccaggctagctacaacgagttcttct

SEQ ID NO: 5462 - DNA, 31 bp, Artificial Sequence
  Description of Artificial Sequence:  Enzymatic Nucleic Acid
gattttaaggctagctacaacgacacgttct

SEQ ID NO: 5463 - DNA, 31 bp, Artificial Sequence
  Description of Artificial Sequence:  Enzymatic Nucleic Acid
gtcacagaggctagctacaacgatttaacca

SEQ ID NO: 5464 - DNA, 31 bp, Artificial Sequence
  Description of Artificial Sequence:  Enzymatic Nucleic Acid
caaagtcaggctagctacaacgaagatttta

SEQ ID NO: 5465 - DNA, 31 bp, Artificial Sequence
  Description of Artificial Sequence:  Enzymatic Nucleic Acid
agccaaagggctagctacaacgacacagatt

SEQ ID NO: 5466 - DNA, 31 bp, Artificial Sequence
  Description of Artificial Sequence:  Enzymatic Nucleic Acid
gggccaagggctagctacaacgacaaagtca

SEQ ID NO: 5467 - DNA, 31 bp, Artificial Sequence
  Description of Artificial Sequence:  Enzymatic Nucleic Acid
atcccgggggctagctacaacgacaagccaa

SEQ ID NO: 5468 - DNA, 31 bp, Artificial Sequence
  Description of Artificial Sequence:  Enzymatic Nucleic Acid
tataaataggctagctacaacgacccgggcc

SEQ ID NO: 5469 - DNA, 31 bp, Artificial Sequence
  Description of Artificial Sequence:  Enzymatic Nucleic Acid
tttataaaggctagctacaacgaatcccggg

SEQ ID NO: 5470 - DNA, 31 bp, Artificial Sequence
  Description of Artificial Sequence:  Enzymatic Nucleic Acid
gatctttaggctagctacaacgaaaatatcc

SEQ ID NO: 5471 - DNA, 31 bp, Artificial Sequence
  Description of Artificial Sequence:  Enzymatic Nucleic Acid
aatctggaggctagctacaacgactttataa

SEQ ID NO: 5472 - DNA, 31 bp, Artificial Sequence
  Description of Artificial Sequence:  Enzymatic Nucleic Acid
tgacataaggctagctacaacgactggatct

SEQ ID NO: 5473 - DNA, 31 bp, Artificial Sequence
  Description of Artificial Sequence:  Enzymatic Nucleic Acid
ttctgacaggctagctacaacgaaatctgga

SEQ ID NO: 5474 - DNA, 31 bp, Artificial Sequence
  Description of Artificial Sequence:  Enzymatic Nucleic Acid
ttttctgaggctagctacaacgaataatctg

SEQ ID NO: 5475 - DNA, 31 bp, Artificial Sequence
  Description of Artificial Sequence:  Enzymatic Nucleic Acid
ggcgagcaggctagctacaacgactcctttt

SEQ ID NO: 5476 - DNA, 31 bp, Artificial Sequence
  Description of Artificial Sequence:  Enzymatic Nucleic Acid
gaggcgagggctagctacaacgaatctcctt

SEQ ID NO: 5477 - DNA, 31 bp, Artificial Sequence
  Description of Artificial Sequence:  Enzymatic Nucleic Acid
aagggaggggctagctacaacgagagcatct

SEQ ID NO: 5478 - DNA, 31 bp, Artificial Sequence
  Description of Artificial Sequence:  Enzymatic Nucleic Acid
gccatccaggctagctacaacgattcaaagg

SEQ ID NO: 5479 - DNA, 31 bp, Artificial Sequence
  Description of Artificial Sequence:  Enzymatic Nucleic Acid
tggggccaggctagctacaacgaccatttca

SEQ ID NO: 5480 - DNA, 31 bp, Artificial Sequence
  Description of Artificial Sequence:  Enzymatic Nucleic Acid
ttctggggggctagctacaacgacatccatt

SEQ ID NO: 5481 - DNA, 31 bp, Artificial Sequence
  Description of Artificial Sequence:  Enzymatic Nucleic Acid
aaaaattgggctagctacaacgattctgggg

SEQ ID NO: 5482 - DNA, 31 bp, Artificial Sequence
  Description of Artificial Sequence:  Enzymatic Nucleic Acid
gtcaaaaaggctagctacaacgatgtttctg

SEQ ID NO: 5483 - DNA, 31 bp, Artificial Sequence
  Description of Artificial Sequence:  Enzymatic Nucleic Acid
acactctgggctagctacaacgacaaaaatt

SEQ ID NO: 5484 - DNA, 31 bp, Artificial Sequence
  Description of Artificial Sequence:  Enzymatic Nucleic Acid
tgtgtacaggctagctacaacgatctgtcaa

SEQ ID NO: 5485 - DNA, 31 bp, Artificial Sequence
  Description of Artificial Sequence:  Enzymatic Nucleic Acid
attgtgtaggctagctacaacgaactctgtc

SEQ ID NO: 5486 - DNA, 31 bp, Artificial Sequence
  Description of Artificial Sequence:  Enzymatic Nucleic Acid
ggattgtgggctagctacaacgaacactctg

SEQ ID NO: 5487 - DNA, 31 bp, Artificial Sequence
  Description of Artificial Sequence:  Enzymatic Nucleic Acid
ctggattgggctagctacaacgagtacactc

SEQ ID NO: 5488 - DNA, 31 bp, Artificial Sequence
  Description of Artificial Sequence:  Enzymatic Nucleic Acid
actctggaggctagctacaacgatgtgtaca

SEQ ID NO: 5489 - DNA, 31 bp, Artificial Sequence
  Description of Artificial Sequence:  Enzymatic Nucleic Acid
agacgtcaggctagctacaacgatctggatt

SEQ ID NO: 5490 - DNA, 31 bp, Artificial Sequence
  Description of Artificial Sequence:  Enzymatic Nucleic Acid
accagacgggctagctacaacgacactctgg

SEQ ID NO: 5491 - DNA, 31 bp, Artificial Sequence
  Description of Artificial Sequence:  Enzymatic Nucleic Acid
agaccagaggctagctacaacgagtcactct

SEQ ID NO: 5492 - DNA, 31 bp, Artificial Sequence
  Description of Artificial Sequence:  Enzymatic Nucleic Acid
ccaaaagaggctagctacaacgacagacgtc

SEQ ID NO: 5493 - DNA, 31 bp, Artificial Sequence
  Description of Artificial Sequence:  Enzymatic Nucleic Acid
gcaaaacaggctagctacaacgacaaaagac

SEQ ID NO: 5494 - DNA, 31 bp, Artificial Sequence
  Description of Artificial Sequence:  Enzymatic Nucleic Acid
cagcaaaaggctagctacaacgaaccaaaag

SEQ ID NO: 5495 - DNA, 31 bp, Artificial Sequence
  Description of Artificial Sequence:  Enzymatic Nucleic Acid
tcccacagggctagctacaacgaaaaacacc

SEQ ID NO: 5496 - DNA, 31 bp, Artificial Sequence
  Description of Artificial Sequence:  Enzymatic Nucleic Acid
atttcccaggctagctacaacgaagcaaaac

SEQ ID NO: 5497 - DNA, 31 bp, Artificial Sequence
  Description of Artificial Sequence:  Enzymatic Nucleic Acid
ggaaaataggctagctacaacgattcccaca

SEQ ID NO: 5498 - DNA, 31 bp, Artificial Sequence
  Description of Artificial Sequence:  Enzymatic Nucleic Acid
aaggaaaaggctagctacaacgaatttccca

SEQ ID NO: 5499 - DNA, 31 bp, Artificial Sequence
  Description of Artificial Sequence:  Enzymatic Nucleic Acid
gagaagcaggctagctacaacgactaaggaa

SEQ ID NO: 5500 - DNA, 31 bp, Artificial Sequence
  Description of Artificial Sequence:  Enzymatic Nucleic Acid
tggagaagggctagctacaacgaacctaagg

SEQ ID NO: 5501 - DNA, 31 bp, Artificial Sequence
  Description of Artificial Sequence:  Enzymatic Nucleic Acid
ccaggataggctagctacaacgaggagaagc

SEQ ID NO: 5502 - DNA, 31 bp, Artificial Sequence
  Description of Artificial Sequence:  Enzymatic Nucleic Acid
ccccaggaggctagctacaacgaatggagaa

SEQ ID NO: 5503 - DNA, 31 bp, Artificial Sequence
  Description of Artificial Sequence:  Enzymatic Nucleic Acid
aatctttaggctagctacaacgacccaggat

SEQ ID NO: 5504 - DNA, 31 bp, Artificial Sequence
  Description of Artificial Sequence:  Enzymatic Nucleic Acid
ttcatcaaggctagctacaacgactttaccc

SEQ ID NO: 5505 - DNA, 31 bp, Artificial Sequence
  Description of Artificial Sequence:  Enzymatic Nucleic Acid
attcttcaggctagctacaacgacaatcttt

SEQ ID NO: 5506 - DNA, 31 bp, Artificial Sequence
  Description of Artificial Sequence:  Enzymatic Nucleic Acid
ctacaaaaggctagctacaacgatcttcatc

SEQ ID NO: 5507 - DNA, 31 bp, Artificial Sequence
  Description of Artificial Sequence:  Enzymatic Nucleic Acid
atcgcctaggctagctacaacgaaaaattct

SEQ ID NO: 5508 - DNA, 31 bp, Artificial Sequence
  Description of Artificial Sequence:  Enzymatic Nucleic Acid
ttcaatcgggctagctacaacgactacaaaa

SEQ ID NO: 5509 - DNA, 31 bp, Artificial Sequence
  Description of Artificial Sequence:  Enzymatic Nucleic Acid
tctttcaaggctagctacaacgacgcctaca

SEQ ID NO: 5510 - DNA, 31 bp, Artificial Sequence
  Description of Artificial Sequence:  Enzymatic Nucleic Acid
cattctagggctagctacaacgatccttctt

SEQ ID NO: 5511 - DNA, 31 bp, Artificial Sequence
  Description of Artificial Sequence:  Enzymatic Nucleic Acid
ggccctcaggctagctacaacgatctagttc

SEQ ID NO: 5512 - DNA, 31 bp, Artificial Sequence
  Description of Artificial Sequence:  Enzymatic Nucleic Acid
atcaggggggctagctacaacgacctcattc

SEQ ID NO: 5513 - DNA, 31 bp, Artificial Sequence
  Description of Artificial Sequence:  Enzymatic Nucleic Acid
tagtataaggctagctacaacgacaggggcc

SEQ ID NO: 5514 - DNA, 31 bp, Artificial Sequence
  Description of Artificial Sequence:  Enzymatic Nucleic Acid
gtgtagtaggctagctacaacgaaatcaggg

SEQ ID NO: 5515 - DNA, 31 bp, Artificial Sequence
  Description of Artificial Sequence:  Enzymatic Nucleic Acid
tggtgtagggctagctacaacgaataatcag

SEQ ID NO: 5516 - DNA, 31 bp, Artificial Sequence
  Description of Artificial Sequence:  Enzymatic Nucleic Acid
ttctggtgggctagctacaacgaagtataat

SEQ ID NO: 5517 - DNA, 31 bp, Artificial Sequence
  Description of Artificial Sequence:  Enzymatic Nucleic Acid
atttctggggctagctacaacgagtagtata

SEQ ID NO: 5518 - DNA, 31 bp, Artificial Sequence
  Description of Artificial Sequence:  Enzymatic Nucleic Acid
ctggtacaggctagctacaacgattctggtg

SEQ ID NO: 5519 - DNA, 31 bp, Artificial Sequence
  Description of Artificial Sequence:  Enzymatic Nucleic Acid
gtctggtaggctagctacaacgaatttctgg

SEQ ID NO: 5520 - DNA, 31 bp, Artificial Sequence
  Description of Artificial Sequence:  Enzymatic Nucleic Acid
tggtctggggctagctacaacgaacatttct

SEQ ID NO: 5521 - DNA, 31 bp, Artificial Sequence
  Description of Artificial Sequence:  Enzymatic Nucleic Acid
cagcatggggctagctacaacgactggtaca

SEQ ID NO: 5522 - DNA, 31 bp, Artificial Sequence
  Description of Artificial Sequence:  Enzymatic Nucleic Acid
gtccagcaggctagctacaacgaggtctggt

SEQ ID NO: 5523 - DNA, 31 bp, Artificial Sequence
  Description of Artificial Sequence:  Enzymatic Nucleic Acid
cagtccagggctagctacaacgaatggtctg

SEQ ID NO: 5524 - DNA, 31 bp, Artificial Sequence; identical to SEQ ID NO: 2525
  Description of Artificial Sequence:  Enzymatic Nucleic Acid

SEQ ID NO: 5525 - DNA, 31 bp, Artificial Sequence
  Description of Artificial Sequence:  Enzymatic Nucleic Acid
cgtgccagggctagctacaacgaagtccagc

SEQ ID NO: 5526 - DNA, 31 bp, Artificial Sequence
  Description of Artificial Sequence:  Enzymatic Nucleic Acid
tccccgtgggctagctacaacgacagcagtc

SEQ ID NO: 5527 - DNA, 31 bp, Artificial Sequence
  Description of Artificial Sequence:  Enzymatic Nucleic Acid
gctccccgggctagctacaacgagccagcag

SEQ ID NO: 5528 - DNA, 31 bp, Artificial Sequence
  Description of Artificial Sequence:  Enzymatic Nucleic Acid
tgactgggggctagctacaacgatccccgtg

SEQ ID NO: 5529 - DNA, 31 bp, Artificial Sequence
  Description of Artificial Sequence:  Enzymatic Nucleic Acid
gtctctgaggctagctacaacgatgggctcc

SEQ ID NO: 5530 - DNA, 31 bp, Artificial Sequence
  Description of Artificial Sequence:  Enzymatic Nucleic Acid
aacgtgggggctagctacaacgactctgact

SEQ ID NO: 5531 - DNA, 31 bp, Artificial Sequence
  Description of Artificial Sequence:  Enzymatic Nucleic Acid
tgaaaacgggctagctacaacgagggtctct

SEQ ID NO: 5532 - DNA, 31 bp, Artificial Sequence
  Description of Artificial Sequence:  Enzymatic Nucleic Acid
tctgaaaaggctagctacaacgagtgggtct

SEQ ID NO: 5533 - DNA, 31 bp, Artificial Sequence
  Description of Artificial Sequence:  Enzymatic Nucleic Acid
tccaccaaggctagctacaacgatctgaaaa

SEQ ID NO: 5534 - DNA, 31 bp, Artificial Sequence
  Description of Artificial Sequence:  Enzymatic Nucleic Acid
atgttccaggctagctacaacgacaactctg

SEQ ID NO: 5535 - DNA, 31 bp, Artificial Sequence
  Description of Artificial Sequence:  Enzymatic Nucleic Acid
cccaaatgggctagctacaacgatccaccaa

SEQ ID NO: 5536 - DNA, 31 bp, Artificial Sequence
  Description of Artificial Sequence:  Enzymatic Nucleic Acid
ttcccaaaggctagctacaacgagttccacc

SEQ ID NO: 5537 - DNA, 31 bp, Artificial Sequence
  Description of Artificial Sequence:  Enzymatic Nucleic Acid
gcaagagaggctagctacaacgattcccaaa

SEQ ID NO: 5538 - DNA, 31 bp, Artificial Sequence
  Description of Artificial Sequence:  Enzymatic Nucleic Acid
ttagcttgggctagctacaacgaaagagatt

SEQ ID NO: 5539 - DNA, 31 bp, Artificial Sequence
  Description of Artificial Sequence:  Enzymatic Nucleic Acid
agcattagggctagctacaacgattgcaaga

SEQ ID NO: 5540 - DNA, 31 bp, Artificial Sequence
  Description of Artificial Sequence:  Enzymatic Nucleic Acid
gctgagcaggctagctacaacgatagcttgc

SEQ ID NO: 5541 - DNA, 31 bp, Artificial Sequence
  Description of Artificial Sequence:  Enzymatic Nucleic Acid
ctgctgagggctagctacaacgaattagctt

SEQ ID NO: 5542 - DNA, 31 bp, Artificial Sequence
  Description of Artificial Sequence:  Enzymatic Nucleic Acid
ccatcctgggctagctacaacgatgagcatt

SEQ ID NO: 5543 - DNA, 31 bp, Artificial Sequence
  Description of Artificial Sequence:  Enzymatic Nucleic Acid
ctttgccaggctagctacaacgacctgctga

SEQ ID NO: 5544 - DNA, 31 bp, Artificial Sequence
  Description of Artificial Sequence:  Enzymatic Nucleic Acid
agtctttgggctagctacaacgacatcctgc

SEQ ID NO: 5545 - DNA, 31 bp, Artificial Sequence
  Description of Artificial Sequence:  Enzymatic Nucleic Acid
caatgtagggctagctacaacgactttgcca

SEQ ID NO: 5546 - DNA, 31 bp, Artificial Sequence
  Description of Artificial Sequence:  Enzymatic Nucleic Acid
gaacaatgggctagctacaacgaagtctttg

SEQ ID NO: 5547 - DNA, 31 bp, Artificial Sequence
  Description of Artificial Sequence:  Enzymatic Nucleic Acid
aagaacaaggctagctacaacgagtagtctt

SEQ ID NO: 5548 - DNA, 31 bp, Artificial Sequence
  Description of Artificial Sequence:  Enzymatic Nucleic Acid
cggaagaaggctagctacaacgaaatgtagt

SEQ ID NO: 5549 - DNA, 31 bp, Artificial Sequence
  Description of Artificial Sequence:  Enzymatic Nucleic Acid
ctctgataggctagctacaacgacggaagaa

SEQ ID NO: 5550 - DNA, 31 bp, Artificial Sequence
  Description of Artificial Sequence:  Enzymatic Nucleic Acid
gtctctgaggctagctacaacgaatcggaag

SEQ ID NO: 5551 - DNA, 31 bp, Artificial Sequence
  Description of Artificial Sequence:  Enzymatic Nucleic Acid
gctcaaagggctagctacaacgactctgata

SEQ ID NO: 5552 - DNA, 31 bp, Artificial Sequence
  Description of Artificial Sequence:  Enzymatic Nucleic Acid
cttccatgggctagctacaacgatcaaagtc

SEQ ID NO: 5553 - DNA, 31 bp, Artificial Sequence
  Description of Artificial Sequence:  Enzymatic Nucleic Acid
ctcttccaggctagctacaacgagctcaaag

SEQ ID NO: 5554 - DNA, 31 bp, Artificial Sequence
  Description of Artificial Sequence:  Enzymatic Nucleic Acid
gtccagaaggctagctacaacgacctcttcc

SEQ ID NO: 5555 - DNA, 31 bp, Artificial Sequence
  Description of Artificial Sequence:  Enzymatic Nucleic Acid
agagagagggctagctacaacgaccagaatc

SEQ ID NO: 5556 - DNA, 31 bp, Artificial Sequence
  Description of Artificial Sequence:  Enzymatic Nucleic Acid
gaggtaggggctagctacaacgaagagagag

SEQ ID NO: 5557 - DNA, 31 bp, Artificial Sequence
  Description of Artificial Sequence:  Enzymatic Nucleic Acid
aggtgaggggctagctacaacgaaggcagag

SEQ ID NO: 5558 - DNA, 31 bp, Artificial Sequence
  Description of Artificial Sequence:  Enzymatic Nucleic Acid
gaaacaggggctagctacaacgagaggtagg

SEQ ID NO: 5559 - DNA, 31 bp, Artificial Sequence
  Description of Artificial Sequence:  Enzymatic Nucleic Acid
acaggaaaggctagctacaacgaaggtgagg

SEQ ID NO: 5560 - DNA, 31 bp, Artificial Sequence
  Description of Artificial Sequence:  Enzymatic Nucleic Acid
cctccataggctagctacaacgaaggaaaca

SEQ ID NO: 5561 - DNA, 31 bp, Artificial Sequence
  Description of Artificial Sequence:  Enzymatic Nucleic Acid
ctcctccaggctagctacaacgaacaggaaa

SEQ ID NO: 5562 - DNA, 31 bp, Artificial Sequence
  Description of Artificial Sequence:  Enzymatic Nucleic Acid
gtcacataggctagctacaacgattcctcct

SEQ ID NO: 5563 - DNA, 31 bp, Artificial Sequence
  Description of Artificial Sequence:  Enzymatic Nucleic Acid
gggtcacaggctagctacaacgaacttcctc

SEQ ID NO: 5564 - DNA, 31 bp, Artificial Sequence
  Description of Artificial Sequence:  Enzymatic Nucleic Acid
tggggtcaggctagctacaacgaatacttcc

SEQ ID NO: 5565 - DNA, 31 bp, Artificial Sequence
  Description of Artificial Sequence:  Enzymatic Nucleic Acid
atttggggggctagctacaacgacacatact

SEQ ID NO: 5566 - DNA, 31 bp, Artificial Sequence
  Description of Artificial Sequence:  Enzymatic Nucleic Acid
taatggaaggctagctacaacgattggggtc

SEQ ID NO: 5567 - DNA, 31 bp, Artificial Sequence
  Description of Artificial Sequence:  Enzymatic Nucleic Acid
tgtcataaggctagctacaacgaggaatttg

SEQ ID NO: 5568 - DNA, 31 bp, Artificial Sequence
  Description of Artificial Sequence:  Enzymatic Nucleic Acid
tgttgtcaggctagctacaacgaaatggaat

SEQ ID NO: 5569 - DNA, 31 bp, Artificial Sequence
  Description of Artificial Sequence:  Enzymatic Nucleic Acid
ctgtgttgggctagctacaacgacataatgg

SEQ ID NO: 5570 - DNA, 31 bp, Artificial Sequence
  Description of Artificial Sequence:  Enzymatic Nucleic Acid
ctgctgtgggctagctacaacgatgtcataa

SEQ ID NO: 5571 - DNA, 31 bp, Artificial Sequence
  Description of Artificial Sequence:  Enzymatic Nucleic Acid
tcctgctgggctagctacaacgagttgtcat

SEQ ID NO: 5572 - DNA, 31 bp, Artificial Sequence
  Description of Artificial Sequence:  Enzymatic Nucleic Acid
gattcctgggctagctacaacgatgtgttgt

SEQ ID NO: 5573 - DNA, 31 bp, Artificial Sequence
  Description of Artificial Sequence:  Enzymatic Nucleic Acid
ctgactgaggctagctacaacgatcctgctg

SEQ ID NO: 5574 - DNA, 31 bp, Artificial Sequence
  Description of Artificial Sequence:  Enzymatic Nucleic Acid
gatactgaggctagctacaacgatgattcct

SEQ ID NO: 5575 - DNA, 31 bp, Artificial Sequence
  Description of Artificial Sequence:  Enzymatic Nucleic Acid
tgcagataggctagctacaacgatgactgat

SEQ ID NO: 5576 - DNA, 31 bp, Artificial Sequence
  Description of Artificial Sequence:  Enzymatic Nucleic Acid
tctgcagaggctagctacaacgaactgactg

SEQ ID NO: 5577 - DNA, 31 bp, Artificial Sequence
  Description of Artificial Sequence:  Enzymatic Nucleic Acid
ctgttctgggctagctacaacgaagatactg

SEQ ID NO: 5578 - DNA, 31 bp, Artificial Sequence
  Description of Artificial Sequence:  Enzymatic Nucleic Acid
gcttactgggctagctacaacgatctgcaga

SEQ ID NO: 5579 - DNA, 31 bp, Artificial Sequence
  Description of Artificial Sequence:  Enzymatic Nucleic Acid
ttcgcttaggctagctacaacgatgttctgc

SEQ ID NO: 5580 - DNA, 31 bp, Artificial Sequence
  Description of Artificial Sequence:  Enzymatic Nucleic Acid
ctctttcgggctagctacaacgattactgtt

SEQ ID NO: 5581 - DNA, 31 bp, Artificial Sequence
  Description of Artificial Sequence:  Enzymatic Nucleic Acid
caggccggggctagctacaacgatctttcgc

SEQ ID NO: 5582 - DNA, 31 bp, Artificial Sequence
  Description of Artificial Sequence:  Enzymatic Nucleic Acid
ctcacaggggctagctacaacgacggctctt

SEQ ID NO: 5583 - DNA, 31 bp, Artificial Sequence
  Description of Artificial Sequence:  Enzymatic Nucleic Acid
tacactcaggctagctacaacgaaggccggc

SEQ ID NO: 5584 - DNA, 31 bp, Artificial Sequence
  Description of Artificial Sequence:  Enzymatic Nucleic Acid
tttttacaggctagctacaacgatcacaggc

SEQ ID NO: 5585 - DNA, 31 bp, Artificial Sequence
  Description of Artificial Sequence:  Enzymatic Nucleic Acid
tgtttttaggctagctacaacgaactcacag

SEQ ID NO: 5586 - DNA, 31 bp, Artificial Sequence
  Description of Artificial Sequence:  Enzymatic Nucleic Acid
ttcaaatgggctagctacaacgattttacac

SEQ ID NO: 5587 - DNA, 31 bp, Artificial Sequence
  Description of Artificial Sequence:  Enzymatic Nucleic Acid
tcttcaaaggctagctacaacgagtttttac

SEQ ID NO: 5588 - DNA, 31 bp, Artificial Sequence
  Description of Artificial Sequence:  Enzymatic Nucleic Acid
acgggataggctagctacaacgacttcaaat

SEQ ID NO: 5589 - DNA, 31 bp, Artificial Sequence
  Description of Artificial Sequence:  Enzymatic Nucleic Acid
taacgggaggctagctacaacgaatcttcaa

SEQ ID NO: 5590 - DNA, 31 bp, Artificial Sequence
  Description of Artificial Sequence:  Enzymatic Nucleic Acid
tcttctaaggctagctacaacgagggatatc

SEQ ID NO: 5591 - DNA, 31 bp, Artificial Sequence
  Description of Artificial Sequence:  Enzymatic Nucleic Acid
acttctggggctagctacaacgatcttctaa

SEQ ID NO: 5592 - DNA, 31 bp, Artificial Sequence
  Description of Artificial Sequence:  Enzymatic Nucleic Acid
tacttttaggctagctacaacgattctggtt

SEQ ID NO: 5593 - DNA, 31 bp, Artificial Sequence
  Description of Artificial Sequence:  Enzymatic Nucleic Acid
tgggattaggctagctacaacgattttactt

SEQ ID NO: 5594 - DNA, 31 bp, Artificial Sequence
  Description of Artificial Sequence:  Enzymatic Nucleic Acid
atctgggaggctagctacaacgatactttta

SEQ ID NO: 5595 - DNA, 31 bp, Artificial Sequence
  Description of Artificial Sequence:  Enzymatic Nucleic Acid
ggttgtcaggctagctacaacgactgggatt

SEQ ID NO: 5596 - DNA, 31 bp, Artificial Sequence
  Description of Artificial Sequence:  Enzymatic Nucleic Acid
tctggttgggctagctacaacgacatctggg

SEQ ID NO: 5597 - DNA, 31 bp, Artificial Sequence
  Description of Artificial Sequence:  Enzymatic Nucleic Acid
ccgtctggggctagctacaacgatgtcatct

SEQ ID NO: 5598 - DNA, 31 bp, Artificial Sequence
  Description of Artificial Sequence:  Enzymatic Nucleic Acid
actgtccgggctagctacaacgactggttgt

SEQ ID NO: 5599 - DNA, 31 bp, Artificial Sequence
  Description of Artificial Sequence:  Enzymatic Nucleic Acid
taccactgggctagctacaacgaccgtctgg

SEQ ID NO: 5600 - DNA, 31 bp, Artificial Sequence
  Description of Artificial Sequence:  Enzymatic Nucleic Acid
ccataccaggctagctacaacgatgtccgtc

SEQ ID NO: 5601 - DNA, 31 bp, Artificial Sequence
  Description of Artificial Sequence:  Enzymatic Nucleic Acid
gaaccataggctagctacaacgacactgtcc

SEQ ID NO: 5602 - DNA, 31 bp, Artificial Sequence
  Description of Artificial Sequence:  Enzymatic Nucleic Acid
aagaaccaggctagctacaacgaaccactgt

SEQ ID NO: 5603 - DNA, 31 bp, Artificial Sequence
  Description of Artificial Sequence:  Enzymatic Nucleic Acid
ggcaagaaggctagctacaacgacataccac

SEQ ID NO: 5604 - DNA, 31 bp, Artificial Sequence
  Description of Artificial Sequence:  Enzymatic Nucleic Acid
ttctgaggggctagctacaacgaaagaacca

SEQ ID NO: 5605 - DNA, 31 bp, Artificial Sequence
  Description of Artificial Sequence:  Enzymatic Nucleic Acid
gttttcagggctagctacaacgatcttctga

SEQ ID NO: 5606 - DNA, 31 bp, Artificial Sequence
  Description of Artificial Sequence:  Enzymatic Nucleic Acid
ttccaaagggctagctacaacgatttcagct

SEQ ID NO: 5607 - DNA, 31 bp, Artificial Sequence
  Description of Artificial Sequence:  Enzymatic Nucleic Acid
tggttctgggctagctacaacgacttccaaa

SEQ ID NO: 5608 - DNA, 31 bp, Artificial Sequence
  Description of Artificial Sequence:  Enzymatic Nucleic Acid
taatttggggctagctacaacgatctgtctt

SEQ ID NO: 5609 - DNA, 31 bp, Artificial Sequence
  Description of Artificial Sequence:  Enzymatic Nucleic Acid
ggagataaggctagctacaacgattggttct

SEQ ID NO: 5610 - DNA, 31 bp, Artificial Sequence
  Description of Artificial Sequence:  Enzymatic Nucleic Acid
gatggagaggctagctacaacgaaatttggt

SEQ ID NO: 5611 - DNA, 31 bp, Artificial Sequence
  Description of Artificial Sequence:  Enzymatic Nucleic Acid
ccaaaagaggctagctacaacgaggagataa

SEQ ID NO: 5612 - DNA, 31 bp, Artificial Sequence
  Description of Artificial Sequence:  Enzymatic Nucleic Acid
ccattccaggctagctacaacgacaaaagat

SEQ ID NO: 5613 - DNA, 31 bp, Artificial Sequence
  Description of Artificial Sequence:  Enzymatic Nucleic Acid
gggcaccaggctagctacaacgatccaccaa

SEQ ID NO: 5614 - DNA, 31 bp, Artificial Sequence
  Description of Artificial Sequence:  Enzymatic Nucleic Acid
gctgggcaggctagctacaacgacattccac

SEQ ID NO: 5615 - DNA, 31 bp, Artificial Sequence
  Description of Artificial Sequence:  Enzymatic Nucleic Acid
ttgctgggggctagctacaacgaaccattcc

SEQ ID NO: 5616 - DNA, 31 bp, Artificial Sequence
  Description of Artificial Sequence:  Enzymatic Nucleic Acid
tgcttttgggctagctacaacgatgggcacc

SEQ ID NO: 5617 - DNA, 31 bp, Artificial Sequence
  Description of Artificial Sequence:  Enzymatic Nucleic Acid
actccctgggctagctacaacgattttgctg

SEQ ID NO: 5618 - DNA, 31 bp, Artificial Sequence
  Description of Artificial Sequence:  Enzymatic Nucleic Acid
gccacagaggctagctacaacgatccctgct

SEQ ID NO: 5619 - DNA, 31 bp, Artificial Sequence
  Description of Artificial Sequence:  Enzymatic Nucleic Acid
agatgccaggctagctacaacgaagactccc

SEQ ID NO: 5620 - DNA, 31 bp, Artificial Sequence
  Description of Artificial Sequence:  Enzymatic Nucleic Acid
ttcagatgggctagctacaacgacacagact

SEQ ID NO: 5621 - DNA, 31 bp, Artificial Sequence
  Description of Artificial Sequence:  Enzymatic Nucleic Acid
ccttcagaggctagctacaacgagccacaga

SEQ ID NO: 5622 - DNA, 31 bp, Artificial Sequence
  Description of Artificial Sequence:  Enzymatic Nucleic Acid
ggtttgagggctagctacaacgacttcagat

SEQ ID NO: 5623 - DNA, 31 bp, Artificial Sequence
  Description of Artificial Sequence:  Enzymatic Nucleic Acid
ttgtctggggctagctacaacgattgagcct

SEQ ID NO: 5624 - DNA, 31 bp, Artificial Sequence
  Description of Artificial Sequence:  Enzymatic Nucleic Acid
gccgcttgggctagctacaacgactggtttg

SEQ ID NO: 5625 - DNA, 31 bp, Artificial Sequence
  Description of Artificial Sequence:  Enzymatic Nucleic Acid
ggtagccgggctagctacaacgattgtctgg

SEQ ID NO: 5626 - DNA, 31 bp, Artificial Sequence
  Description of Artificial Sequence:  Enzymatic Nucleic Acid
actggtagggctagctacaacgacgcttgtc

SEQ ID NO: 5627 - DNA, 31 bp, Artificial Sequence
  Description of Artificial Sequence:  Enzymatic Nucleic Acid
cggactggggctagctacaacgaagccgctt

SEQ ID NO: 5628 - DNA, 31 bp, Artificial Sequence
  Description of Artificial Sequence:  Enzymatic Nucleic Acid
tatccggaggctagctacaacgatggtagcc

SEQ ID NO: 5629 - DNA, 31 bp, Artificial Sequence
  Description of Artificial Sequence:  Enzymatic Nucleic Acid
gagtgataggctagctacaacgaccggactg

SEQ ID NO: 5630 - DNA, 31 bp, Artificial Sequence
  Description of Artificial Sequence:  Enzymatic Nucleic Acid
cggagtgaggctagctacaacgaatccggac

SEQ ID NO: 5631 - DNA, 31 bp, Artificial Sequence
  Description of Artificial Sequence:  Enzymatic Nucleic Acid
catcggagggctagctacaacgagatatccg

SEQ ID NO: 5632 - DNA, 31 bp, Artificial Sequence
  Description of Artificial Sequence:  Enzymatic Nucleic Acid
ctgtgtcaggctagctacaacgacggagtga

SEQ ID NO: 5633 - DNA, 31 bp, Artificial Sequence
  Description of Artificial Sequence:  Enzymatic Nucleic Acid
tgtctgtgggctagctacaacgacatcggag

SEQ ID NO: 5634 - DNA, 31 bp, Artificial Sequence
  Description of Artificial Sequence:  Enzymatic Nucleic Acid
ggtgtctgggctagctacaacgagtcatcgg

SEQ ID NO: 5635 - DNA, 31 bp, Artificial Sequence
  Description of Artificial Sequence:  Enzymatic Nucleic Acid
cggtggtgggctagctacaacgactgtgtca

SEQ ID NO: 5636 - DNA, 31 bp, Artificial Sequence
  Description of Artificial Sequence:  Enzymatic Nucleic Acid
cacggtggggctagctacaacgagtctgtgt

SEQ ID NO: 5637 - DNA, 31 bp, Artificial Sequence
  Description of Artificial Sequence:  Enzymatic Nucleic Acid
gtacacggggctagctacaacgaggtgtctg

SEQ ID NO: 5638 - DNA, 31 bp, Artificial Sequence
  Description of Artificial Sequence:  Enzymatic Nucleic Acid
ggagtacaggctagctacaacgaggtggtgt

SEQ ID NO: 5639 - DNA, 31 bp, Artificial Sequence
  Description of Artificial Sequence:  Enzymatic Nucleic Acid
ctggagtaggctagctacaacgaacggtggt

SEQ ID NO: 5640 - DNA, 31 bp, Artificial Sequence
  Description of Artificial Sequence:  Enzymatic Nucleic Acid
cactggagggctagctacaacgaacacggtg

SEQ ID NO: 5641 - DNA, 31 bp, Artificial Sequence
  Description of Artificial Sequence:  Enzymatic Nucleic Acid
cttcctcaggctagctacaacgatggagtac

SEQ ID NO: 5642 - DNA, 31 bp, Artificial Sequence
  Description of Artificial Sequence:  Enzymatic Nucleic Acid
aagttctgggctagctacaacgattcctcac

SEQ ID NO: 5643 - DNA, 31 bp, Artificial Sequence
  Description of Artificial Sequence:  Enzymatic Nucleic Acid
tttaaaagggctagctacaacgatctgcttc

SEQ ID NO: 5644 - DNA, 31 bp, Artificial Sequence
  Description of Artificial Sequence:  Enzymatic Nucleic Acid
tctatcagggctagctacaacgatttaaaag

SEQ ID NO: 5645 - DNA, 31 bp, Artificial Sequence
  Description of Artificial Sequence:  Enzymatic Nucleic Acid
aatctctaggctagctacaacgacagcttta

SEQ ID NO: 5646 - DNA, 31 bp, Artificial Sequence
  Description of Artificial Sequence:  Enzymatic Nucleic Acid
cactccaaggctagctacaacgactctatca

SEQ ID NO: 5647 - DNA, 31 bp, Artificial Sequence
  Description of Artificial Sequence:  Enzymatic Nucleic Acid
ggtttgcaggctagctacaacgatccaatct

SEQ ID NO: 5648 - DNA, 31 bp, Artificial Sequence
  Description of Artificial Sequence:  Enzymatic Nucleic Acid
ccggtttgggctagctacaacgaactccaat

SEQ ID NO: 5649 - DNA, 31 bp, Artificial Sequence
  Description of Artificial Sequence:  Enzymatic Nucleic Acid
gctaccggggctagctacaacgattgcactc

SEQ ID NO: 5650 - DNA, 31 bp, Artificial Sequence
  Description of Artificial Sequence:  Enzymatic Nucleic Acid
ctgtgctaggctagctacaacgacggtttgc

SEQ ID NO: 5651 - DNA, 31 bp, Artificial Sequence
  Description of Artificial Sequence:  Enzymatic Nucleic Acid
gggctgtgggctagctacaacgataccggtt

SEQ ID NO: 5652 - DNA, 31 bp, Artificial Sequence
  Description of Artificial Sequence:  Enzymatic Nucleic Acid
ctgggctgggctagctacaacgagctaccgg

SEQ ID NO: 5653 - DNA, 31 bp, Artificial Sequence
  Description of Artificial Sequence:  Enzymatic Nucleic Acid
aatctgggggctagctacaacgatgtgctac

SEQ ID NO: 5654 - DNA, 31 bp, Artificial Sequence
  Description of Artificial Sequence:  Enzymatic Nucleic Acid
ctggagaaggctagctacaacgactgggctg

SEQ ID NO: 5655 - DNA, 31 bp, Artificial Sequence
  Description of Artificial Sequence:  Enzymatic Nucleic Acid
gagtcaggggctagctacaacgatggagaat

SEQ ID NO: 5656 - DNA, 31 bp, Artificial Sequence
  Description of Artificial Sequence:  Enzymatic Nucleic Acid
tccccgagggctagctacaacgacaggctgg

SEQ ID NO: 5657 - DNA, 31 bp, Artificial Sequence
  Description of Artificial Sequence:  Enzymatic Nucleic Acid
cagtgtggggctagctacaacgaccccgagt

SEQ ID NO: 5658 - DNA, 31 bp, Artificial Sequence
  Description of Artificial Sequence:  Enzymatic Nucleic Acid
gctcagtgggctagctacaacgaggtccccg

SEQ ID NO: 5659 - DNA, 31 bp, Artificial Sequence
  Description of Artificial Sequence:  Enzymatic Nucleic Acid
gagctcagggctagctacaacgagtggtccc

SEQ ID NO: 5660 - DNA, 31 bp, Artificial Sequence
  Description of Artificial Sequence:  Enzymatic Nucleic Acid
gaggagagggctagctacaacgatcagtgtg

SEQ ID NO: 5661 - DNA, 31 bp, Artificial Sequence
  Description of Artificial Sequence:  Enzymatic Nucleic Acid
cttttaaaggctagctacaacgaaggaggag

SEQ ID NO: 5662 - DNA, 31 bp, Artificial Sequence
  Description of Artificial Sequence:  Enzymatic Nucleic Acid
tgtggatgggctagctacaacgattcctttt

SEQ ID NO: 5663 - DNA, 31 bp, Artificial Sequence
  Description of Artificial Sequence:  Enzymatic Nucleic Acid
ggtgtggaggctagctacaacgagcttcctt

SEQ ID NO: 5664 - DNA, 31 bp, Artificial Sequence
  Description of Artificial Sequence:  Enzymatic Nucleic Acid
ttggggtgggctagctacaacgaggatgctt

SEQ ID NO: 5665 - DNA, 31 bp, Artificial Sequence
  Description of Artificial Sequence:  Enzymatic Nucleic Acid
agttggggggctagctacaacgagtggatgc

SEQ ID NO: 5666 - DNA, 31 bp, Artificial Sequence
  Description of Artificial Sequence:  Enzymatic Nucleic Acid
tccgggagggctagctacaacgatggggtgt

SEQ ID NO: 5667 - DNA, 31 bp, Artificial Sequence
  Description of Artificial Sequence:  Enzymatic Nucleic Acid
atgtgatgggctagctacaacgaccgggagt

SEQ ID NO: 5668 - DNA, 31 bp, Artificial Sequence
  Description of Artificial Sequence:  Enzymatic Nucleic Acid
tcatgtgaggctagctacaacgagtccggga

SEQ ID NO: 5669 - DNA, 31 bp, Artificial Sequence
  Description of Artificial Sequence:  Enzymatic Nucleic Acid
ctctcatgggctagctacaacgagatgtccg

SEQ ID NO: 5670 - DNA, 31 bp, Artificial Sequence
  Description of Artificial Sequence:  Enzymatic Nucleic Acid
acctctcaggctagctacaacgagtgatgtc

SEQ ID NO: 5671 - DNA, 31 bp, Artificial Sequence
  Description of Artificial Sequence:  Enzymatic Nucleic Acid
tgagcagaggctagctacaacgactctcatg

SEQ ID NO: 5672 - DNA, 31 bp, Artificial Sequence
  Description of Artificial Sequence:  Enzymatic Nucleic Acid
aatctgagggctagctacaacgaagacctct

SEQ ID NO: 5673 - DNA, 31 bp, Artificial Sequence
  Description of Artificial Sequence:  Enzymatic Nucleic Acid
cttcaaaaggctagctacaacgactgagcag

SEQ ID NO: 5674 - DNA, 31 bp, Artificial Sequence
  Description of Artificial Sequence:  Enzymatic Nucleic Acid
gaacaacaggctagctacaacgattcaaaat

SEQ ID NO: 5675 - DNA, 31 bp, Artificial Sequence
  Description of Artificial Sequence:  Enzymatic Nucleic Acid
aagaacaaggctagctacaacgaacttcaaa

SEQ ID NO: 5676 - DNA, 31 bp, Artificial Sequence
  Description of Artificial Sequence:  Enzymatic Nucleic Acid
ggaaagaaggctagctacaacgaaacacttc

SEQ ID NO: 5677 - DNA, 31 bp, Artificial Sequence
  Description of Artificial Sequence:  Enzymatic Nucleic Acid
cctgctggggctagctacaacgaggaaagaa

SEQ ID NO: 5678 - DNA, 31 bp, Artificial Sequence
  Description of Artificial Sequence:  Enzymatic Nucleic Acid
acttcctgggctagctacaacgatggtggaa

SEQ ID NO: 5679 - DNA, 31 bp, Artificial Sequence
  Description of Artificial Sequence:  Enzymatic Nucleic Acid
tgcggctaggctagctacaacgattcctgct

SEQ ID NO: 5680 - DNA, 31 bp, Artificial Sequence
  Description of Artificial Sequence:  Enzymatic Nucleic Acid
aaatgcggggctagctacaacgatacttcct

SEQ ID NO: 5681 - DNA, 31 bp, Artificial Sequence
  Description of Artificial Sequence:  Enzymatic Nucleic Acid
atcaaatgggctagctacaacgaggctactt

SEQ ID NO: 5682 - DNA, 31 bp, Artificial Sequence
  Description of Artificial Sequence:  Enzymatic Nucleic Acid
aaatcaaaggctagctacaacgagcggctac

SEQ ID NO: 5683 - DNA, 31 bp, Artificial Sequence
  Description of Artificial Sequence:  Enzymatic Nucleic Acid
aatgaaaaggctagctacaacgacaaatgcg

SEQ ID NO: 5684 - DNA, 31 bp, Artificial Sequence
  Description of Artificial Sequence:  Enzymatic Nucleic Acid
tgtcgaaaggctagctacaacgagaaaatca

SEQ ID NO: 5685 - DNA, 31 bp, Artificial Sequence
  Description of Artificial Sequence:  Enzymatic Nucleic Acid
ttctgttgggctagctacaacgacgaaatga

SEQ ID NO: 5686 - DNA, 31 bp, Artificial Sequence
  Description of Artificial Sequence:  Enzymatic Nucleic Acid
tttttctgggctagctacaacgatgtcgaaa

SEQ ID NO: 5687 - DNA, 31 bp, Artificial Sequence
  Description of Artificial Sequence:  Enzymatic Nucleic Acid
gtccgaggggctagctacaacgacctttttc

SEQ ID NO: 5688 - DNA, 31 bp, Artificial Sequence
  Description of Artificial Sequence:  Enzymatic Nucleic Acid
ccctgcagggctagctacaacgaccgaggtc

SEQ ID NO: 5689 - DNA, 31 bp, Artificial Sequence
  Description of Artificial Sequence:  Enzymatic Nucleic Acid
gctccctgggctagctacaacgaagtccgag

SEQ ID NO: 5690 - DNA, 31 bp, Artificial Sequence
  Description of Artificial Sequence:  Enzymatic Nucleic Acid
aagactggggctagctacaacgatccctgca

SEQ ID NO: 5691 - DNA, 31 bp, Artificial Sequence
  Description of Artificial Sequence:  Enzymatic Nucleic Acid
ctagaagaggctagctacaacgatggctccc

SEQ ID NO: 5692 - DNA, 31 bp, Artificial Sequence
  Description of Artificial Sequence:  Enzymatic Nucleic Acid
aggatatgggctagctacaacgactagaaga

SEQ ID NO: 5693 - DNA, 31 bp, Artificial Sequence
  Description of Artificial Sequence:  Enzymatic Nucleic Acid
ccaggataggctagctacaacgagcctagaa

SEQ ID NO: 5694 - DNA, 31 bp, Artificial Sequence
  Description of Artificial Sequence:  Enzymatic Nucleic Acid
ttccaggaggctagctacaacgaatgcctag

SEQ ID NO: 5695 - DNA, 31 bp, Artificial Sequence
  Description of Artificial Sequence:  Enzymatic Nucleic Acid
gtcacaagggctagctacaacgactcttcca

SEQ ID NO: 5696 - DNA, 31 bp, Artificial Sequence
  Description of Artificial Sequence:  Enzymatic Nucleic Acid
ttgggtcaggctagctacaacgaaagcctct

SEQ ID NO: 5697 - DNA, 31 bp, Artificial Sequence
  Description of Artificial Sequence:  Enzymatic Nucleic Acid
ttcttgggggctagctacaacgacacaagcc

SEQ ID NO: 5698 - DNA, 31 bp, Artificial Sequence
  Description of Artificial Sequence:  Enzymatic Nucleic Acid
cagacacaggctagctacaacgatcttgggt

SEQ ID NO: 5699 - DNA, 31 bp, Artificial Sequence
  Description of Artificial Sequence:  Enzymatic Nucleic Acid
cacagacaggctagctacaacgaattcttgg

SEQ ID NO: 5700 - DNA, 31 bp, Artificial Sequence
  Description of Artificial Sequence:  Enzymatic Nucleic Acid
gacacagaggctagctacaacgaacattctt

SEQ ID NO: 5701 - DNA, 31 bp, Artificial Sequence
  Description of Artificial Sequence:  Enzymatic Nucleic Acid
agaagacaggctagctacaacgaagacacat

SEQ ID NO: 5702 - DNA, 31 bp, Artificial Sequence
  Description of Artificial Sequence:  Enzymatic Nucleic Acid
ggagaagaggctagctacaacgaacagacac

SEQ ID NO: 5703 - DNA, 31 bp, Artificial Sequence
  Description of Artificial Sequence:  Enzymatic Nucleic Acid
ggtcaacaggctagctacaacgatgggagaa

SEQ ID NO: 5704 - DNA, 31 bp, Artificial Sequence
  Description of Artificial Sequence:  Enzymatic Nucleic Acid
caggtcaaggctagctacaacgaactgggag

SEQ ID NO: 5705 - DNA, 31 bp, Artificial Sequence
  Description of Artificial Sequence:  Enzymatic Nucleic Acid
ggatcaggggctagctacaacgacaacactg

SEQ ID NO: 5706 - DNA, 31 bp, Artificial Sequence
  Description of Artificial Sequence:  Enzymatic Nucleic Acid
aaagaggaggctagctacaacgacaggtcaa

SEQ ID NO: 5707 - DNA, 31 bp, Artificial Sequence
  Description of Artificial Sequence:  Enzymatic Nucleic Acid
taaatgaaggctagctacaacgagaaaaaag

SEQ ID NO: 5708 - DNA, 31 bp, Artificial Sequence
  Description of Artificial Sequence:  Enzymatic Nucleic Acid
tttttaaaggctagctacaacgagaatgaaa

SEQ ID NO: 5709 - DNA, 31 bp, Artificial Sequence
  Description of Artificial Sequence:  Enzymatic Nucleic Acid
tgataatgggctagctacaacgatttttaaa

SEQ ID NO: 5710 - DNA, 31 bp, Artificial Sequence
  Description of Artificial Sequence:  Enzymatic Nucleic Acid
catgataaggctagctacaacgagcttttta

SEQ ID NO: 5711 - DNA, 31 bp, Artificial Sequence
  Description of Artificial Sequence:  Enzymatic Nucleic Acid
gggcatgaggctagctacaacgaaatgcttt

SEQ ID NO: 5712 - DNA, 31 bp, Artificial Sequence
  Description of Artificial Sequence:  Enzymatic Nucleic Acid
caggggcaggctagctacaacgagataatgc

SEQ ID NO: 5713 - DNA, 31 bp, Artificial Sequence
  Description of Artificial Sequence:  Enzymatic Nucleic Acid
agcaggggggctagctacaacgaatgataat

SEQ ID NO: 5714 - DNA, 31 bp, Artificial Sequence
  Description of Artificial Sequence:  Enzymatic Nucleic Acid
acccgcagggctagctacaacgaaggggcat

SEQ ID NO: 5715 - DNA, 31 bp, Artificial Sequence
  Description of Artificial Sequence:  Enzymatic Nucleic Acid
gagacccgggctagctacaacgaagcagggg

SEQ ID NO: 5716 - DNA, 31 bp, Artificial Sequence
  Description of Artificial Sequence:  Enzymatic Nucleic Acid
tggtgagaggctagctacaacgaccgcagca

SEQ ID NO: 5717 - DNA, 31 bp, Artificial Sequence
  Description of Artificial Sequence:  Enzymatic Nucleic Acid
acccatggggctagctacaacgagagacccg

SEQ ID NO: 5718 - DNA, 31 bp, Artificial Sequence
  Description of Artificial Sequence:  Enzymatic Nucleic Acid
taaacccaggctagctacaacgaggtgagac

SEQ ID NO: 5719 - DNA, 31 bp, Artificial Sequence
  Description of Artificial Sequence:  Enzymatic Nucleic Acid
gttctaaaggctagctacaacgaccatggtg

SEQ ID NO: 5720 - DNA, 31 bp, Artificial Sequence
  Description of Artificial Sequence:  Enzymatic Nucleic Acid
gctctttgggctagctacaacgatctaaacc

SEQ ID NO: 5721 - DNA, 31 bp, Artificial Sequence
  Description of Artificial Sequence:  Enzymatic Nucleic Acid
gcttgaagggctagctacaacgatctttgtt

SEQ ID NO: 5722 - DNA, 31 bp, Artificial Sequence
  Description of Artificial Sequence:  Enzymatic Nucleic Acid
ggccattgggctagctacaacgattgaagct

SEQ ID NO: 5723 - DNA, 31 bp, Artificial Sequence
  Description of Artificial Sequence:  Enzymatic Nucleic Acid
tggggccaggctagctacaacgatgcttgaa

SEQ ID NO: 5724 - DNA, 31 bp, Artificial Sequence
  Description of Artificial Sequence:  Enzymatic Nucleic Acid
ggatggggggctagctacaacgacattgctt

SEQ ID NO: 5725 - DNA, 31 bp, Artificial Sequence
  Description of Artificial Sequence:  Enzymatic Nucleic Acid
tttgaggaggctagctacaacgaggggccat

SEQ ID NO: 5726 - DNA, 31 bp, Artificial Sequence
  Description of Artificial Sequence:  Enzymatic Nucleic Acid
tactgctaggctagctacaacgattctttga

SEQ ID NO: 5727 - DNA, 31 bp, Artificial Sequence
  Description of Artificial Sequence:  Enzymatic Nucleic Acid
aggtactgggctagctacaacgatacttctt

SEQ ID NO: 5728 - DNA, 31 bp, Artificial Sequence
  Description of Artificial Sequence:  Enzymatic Nucleic Acid
cccaggtaggctagctacaacgatgctactt

SEQ ID NO: 5729 - DNA, 31 bp, Artificial Sequence
  Description of Artificial Sequence:  Enzymatic Nucleic Acid
tccccaggggctagctacaacgaactgctac

SEQ ID NO: 5730 - DNA, 31 bp, Artificial Sequence
  Description of Artificial Sequence:  Enzymatic Nucleic Acid
agtgtcagggctagctacaacgatccccagg

SEQ ID NO: 5731 - DNA, 31 bp, Artificial Sequence
  Description of Artificial Sequence:  Enzymatic Nucleic Acid
cagaagtgggctagctacaacgacagctccc

SEQ ID NO: 5732 - DNA, 31 bp, Artificial Sequence
  Description of Artificial Sequence:  Enzymatic Nucleic Acid
tacagaagggctagctacaacgagtcagctc

SEQ ID NO: 5733 - DNA, 31 bp, Artificial Sequence
  Description of Artificial Sequence:  Enzymatic Nucleic Acid
tagttttaggctagctacaacgaagaagtgt

SEQ ID NO: 5734 - DNA, 31 bp, Artificial Sequence
  Description of Artificial Sequence:  Enzymatic Nucleic Acid
tcttctagggctagctacaacgatttacaga

SEQ ID NO: 5735 - DNA, 31 bp, Artificial Sequence
  Description of Artificial Sequence:  Enzymatic Nucleic Acid
ctggtttaggctagctacaacgacttctagt

SEQ ID NO: 5736 - DNA, 31 bp, Artificial Sequence
  Description of Artificial Sequence:  Enzymatic Nucleic Acid
ttgcctggggctagctacaacgattatcttc

SEQ ID NO: 5737 - DNA, 31 bp, Artificial Sequence
  Description of Artificial Sequence:  Enzymatic Nucleic Acid
ttacgttgggctagctacaacgactggttta

SEQ ID NO: 5738 - DNA, 31 bp, Artificial Sequence
  Description of Artificial Sequence:  Enzymatic Nucleic Acid
cacttacgggctagctacaacgatgcctggt

SEQ ID NO: 5739 - DNA, 31 bp, Artificial Sequence
  Description of Artificial Sequence:  Enzymatic Nucleic Acid
aacacttaggctagctacaacgagttgcctg

SEQ ID NO: 5740 - DNA, 31 bp, Artificial Sequence
  Description of Artificial Sequence:  Enzymatic Nucleic Acid
ctcgaacaggctagctacaacgattacgttg

SEQ ID NO: 5741 - DNA, 31 bp, Artificial Sequence
  Description of Artificial Sequence:  Enzymatic Nucleic Acid
acctcgaaggctagctacaacgaacttacgt

SEQ ID NO: 5742 - DNA, 31 bp, Artificial Sequence
  Description of Artificial Sequence:  Enzymatic Nucleic Acid
cttcaacaggctagctacaacgactcgaaca

SEQ ID NO: 5743 - DNA, 31 bp, Artificial Sequence
  Description of Artificial Sequence:  Enzymatic Nucleic Acid
atcttcaaggctagctacaacgaacctcgaa

SEQ ID NO: 5744 - DNA, 31 bp, Artificial Sequence
  Description of Artificial Sequence:  Enzymatic Nucleic Acid
ccttcccaggctagctacaacgacttcaaca

SEQ ID NO: 5745 - DNA, 31 bp, Artificial Sequence
  Description of Artificial Sequence:  Enzymatic Nucleic Acid
cctgcaaaggctagctacaacgaccttccca

SEQ ID NO: 5746 - DNA, 31 bp, Artificial Sequence
  Description of Artificial Sequence:  Enzymatic Nucleic Acid
cagccctgggctagctacaacgaaaatcctt

SEQ ID NO: 5747 - DNA, 31 bp, Artificial Sequence
  Description of Artificial Sequence:  Enzymatic Nucleic Acid
agactcagggctagctacaacgacctgcaaa

SEQ ID NO: 5748 - DNA, 31 bp, Artificial Sequence
  Description of Artificial Sequence:  Enzymatic Nucleic Acid
tggatagaggctagctacaacgatcagccct

SEQ ID NO: 5749 - DNA, 31 bp, Artificial Sequence
  Description of Artificial Sequence:  Enzymatic Nucleic Acid
ctcttggaggctagctacaacgaagactcag

SEQ ID NO: 5750 - DNA, 31 bp, Artificial Sequence
  Description of Artificial Sequence:  Enzymatic Nucleic Acid
aaacaaagggctagctacaacgactcttgga

SEQ ID NO: 5751 - DNA, 31 bp, Artificial Sequence
  Description of Artificial Sequence:  Enzymatic Nucleic Acid
gtcctaaaggctagctacaacgaaaagcctc

SEQ ID NO: 5752 - DNA, 31 bp, Artificial Sequence
  Description of Artificial Sequence:  Enzymatic Nucleic Acid
gacccacgggctagctacaacgacctaaaca

SEQ ID NO: 5753 - DNA, 31 bp, Artificial Sequence
  Description of Artificial Sequence:  Enzymatic Nucleic Acid
gggacccaggctagctacaacgagtcctaaa

SEQ ID NO: 5754 - DNA, 31 bp, Artificial Sequence
  Description of Artificial Sequence:  Enzymatic Nucleic Acid
gcttgggaggctagctacaacgaccacgtcc

SEQ ID NO: 5755 - DNA, 31 bp, Artificial Sequence
  Description of Artificial Sequence:  Enzymatic Nucleic Acid
aggcttggggctagctacaacgattgggacc

SEQ ID NO: 5756 - DNA, 31 bp, Artificial Sequence
  Description of Artificial Sequence:  Enzymatic Nucleic Acid
acttaaggggctagctacaacgattggcttg

SEQ ID NO: 5757 - DNA, 31 bp, Artificial Sequence
  Description of Artificial Sequence:  Enzymatic Nucleic Acid
attccacaggctagctacaacgattaaggct

SEQ ID NO: 5758 - DNA, 31 bp, Artificial Sequence
  Description of Artificial Sequence:  Enzymatic Nucleic Acid
gaattccaggctagctacaacgaacttaagg

SEQ ID NO: 5759 - DNA, 31 bp, Artificial Sequence
  Description of Artificial Sequence:  Enzymatic Nucleic Acid
aatccgaaggctagctacaacgatccacact

SEQ ID NO: 5760 - DNA, 31 bp, Artificial Sequence
  Description of Artificial Sequence:  Enzymatic Nucleic Acid
tctatcaaggctagctacaacgaccgaattc

SEQ ID NO: 5761 - DNA, 31 bp, Artificial Sequence
  Description of Artificial Sequence:  Enzymatic Nucleic Acid
cctttctaggctagctacaacgacaatccga

SEQ ID NO: 5762 - DNA, 31 bp, Artificial Sequence
  Description of Artificial Sequence:  Enzymatic Nucleic Acid
aacgttagggctagctacaacgacttccttt

SEQ ID NO: 5763 - DNA, 31 bp, Artificial Sequence
  Description of Artificial Sequence:  Enzymatic Nucleic Acid
aggtaacgggctagctacaacgatagtcttc

SEQ ID NO: 5764 - DNA, 31 bp, Artificial Sequence
  Description of Artificial Sequence:  Enzymatic Nucleic Acid
caaggtaaggctagctacaacgagttagtct

SEQ ID NO: 5765 - DNA, 31 bp, Artificial Sequence
  Description of Artificial Sequence:  Enzymatic Nucleic Acid
aagcaaggggctagctacaacgaaacgttag

SEQ ID NO: 5766 - DNA, 31 bp, Artificial Sequence
  Description of Artificial Sequence:  Enzymatic Nucleic Acid
ctccaaagggctagctacaacgaaaggtaac

SEQ ID NO: 5767 - DNA, 31 bp, Artificial Sequence
  Description of Artificial Sequence:  Enzymatic Nucleic Acid
ctccagtaggctagctacaacgatctccaaa

SEQ ID NO: 5768 - DNA, 31 bp, Artificial Sequence
  Description of Artificial Sequence:  Enzymatic Nucleic Acid
ggctccagggctagctacaacgaactctcca

SEQ ID NO: 5769 - DNA, 31 bp, Artificial Sequence
  Description of Artificial Sequence:  Enzymatic Nucleic Acid
tttgcaggggctagctacaacgatccagtac

SEQ ID NO: 5770 - DNA, 31 bp, Artificial Sequence
  Description of Artificial Sequence:  Enzymatic Nucleic Acid
tgcatttgggctagctacaacgaaggctcca

SEQ ID NO: 5771 - DNA, 31 bp, Artificial Sequence
  Description of Artificial Sequence:  Enzymatic Nucleic Acid
acaatgcaggctagctacaacgattgcaggc

SEQ ID NO: 5772 - DNA, 31 bp, Artificial Sequence
  Description of Artificial Sequence:  Enzymatic Nucleic Acid
acacaatgggctagctacaacgaatttgcag

SEQ ID NO: 5773 - DNA, 31 bp, Artificial Sequence
  Description of Artificial Sequence:  Enzymatic Nucleic Acid
aaacacaaggctagctacaacgagcatttgc

SEQ ID NO: 5774 - DNA, 31 bp, Artificial Sequence
  Description of Artificial Sequence:  Enzymatic Nucleic Acid
agcaaacaggctagctacaacgaaatgcatt

SEQ ID NO: 5775 - DNA, 31 bp, Artificial Sequence
  Description of Artificial Sequence:  Enzymatic Nucleic Acid
agagcaaaggctagctacaacgaacaatgca

SEQ ID NO: 5776 - DNA, 31 bp, Artificial Sequence
  Description of Artificial Sequence:  Enzymatic Nucleic Acid
caccagagggctagctacaacgaaaacacaa

SEQ ID NO: 5777 - DNA, 31 bp, Artificial Sequence
  Description of Artificial Sequence:  Enzymatic Nucleic Acid
cacctccaggctagctacaacgacagagcaa

SEQ ID NO: 5778 - DNA, 31 bp, Artificial Sequence
  Description of Artificial Sequence:  Enzymatic Nucleic Acid
catgcccaggctagctacaacgactccacca

SEQ ID NO: 5779 - DNA, 31 bp, Artificial Sequence
  Description of Artificial Sequence:  Enzymatic Nucleic Acid
accccatgggctagctacaacgaccacctcc

SEQ ID NO: 5780 - DNA, 31 bp, Artificial Sequence
  Description of Artificial Sequence:  Enzymatic Nucleic Acid
agaccccaggctagctacaacgagcccacct

SEQ ID NO: 5781 - DNA, 31 bp, Artificial Sequence
  Description of Artificial Sequence:  Enzymatic Nucleic Acid
agaacagaggctagctacaacgacccatgcc

SEQ ID NO: 5782 - DNA, 31 bp, Artificial Sequence
  Description of Artificial Sequence:  Enzymatic Nucleic Acid
tttcagaaggctagctacaacgaagacccca

SEQ ID NO: 5783 - DNA, 31 bp, Artificial Sequence
  Description of Artificial Sequence:  Enzymatic Nucleic Acid
cctttacaggctagctacaacgattcagaac

SEQ ID NO: 5784 - DNA, 31 bp, Artificial Sequence
  Description of Artificial Sequence:  Enzymatic Nucleic Acid
accctttaggctagctacaacgaatttcaga

SEQ ID NO: 5785 - DNA, 31 bp, Artificial Sequence
  Description of Artificial Sequence:  Enzymatic Nucleic Acid
cgtctgaaggctagctacaacgacctttaca

SEQ ID NO: 5786 - DNA, 31 bp, Artificial Sequence
  Description of Artificial Sequence:  Enzymatic Nucleic Acid
aaaccccgggctagctacaacgactgaaccc

SEQ ID NO: 5787 - DNA, 31 bp, Artificial Sequence
  Description of Artificial Sequence:  Enzymatic Nucleic Acid
accagaaaggctagctacaacgacccgtctg

SEQ ID NO: 5788 - DNA, 31 bp, Artificial Sequence
  Description of Artificial Sequence:  Enzymatic Nucleic Acid
ttctaaaaggctagctacaacgacagaaacc

SEQ ID NO: 5789 - DNA, 31 bp, Artificial Sequence
  Description of Artificial Sequence:  Enzymatic Nucleic Acid
acacgcaaggctagctacaacgacttctaaa

SEQ ID NO: 5790 - DNA, 31 bp, Artificial Sequence
  Description of Artificial Sequence:  Enzymatic Nucleic Acid
agaacacgggctagctacaacgaaaccttct

SEQ ID NO: 5791 - DNA, 31 bp, Artificial Sequence
  Description of Artificial Sequence:  Enzymatic Nucleic Acid
gaagaacaggctagctacaacgagcaacctt

SEQ ID NO: 5792 - DNA, 31 bp, Artificial Sequence
  Description of Artificial Sequence:  Enzymatic Nucleic Acid
tcgaagaaggctagctacaacgaacgcaacc

SEQ ID NO: 5793 - DNA, 31 bp, Artificial Sequence
  Description of Artificial Sequence:  Enzymatic Nucleic Acid
tagcccaaggctagctacaacgatcgaagaa

SEQ ID NO: 5794 - DNA, 31 bp, Artificial Sequence
  Description of Artificial Sequence:  Enzymatic Nucleic Acid
tactttagggctagctacaacgaccaactcg

SEQ ID NO: 5795 - DNA, 31 bp, Artificial Sequence
  Description of Artificial Sequence:  Enzymatic Nucleic Acid
gaactctaggctagctacaacgatttagccc

SEQ ID NO: 5796 - DNA, 31 bp, Artificial Sequence
  Description of Artificial Sequence:  Enzymatic Nucleic Acid
acaacgaaggctagctacaacgatctacttt

SEQ ID NO: 5797 - DNA, 31 bp, Artificial Sequence
  Description of Artificial Sequence:  Enzymatic Nucleic Acid
cagcacaaggctagctacaacgagaactcta

SEQ ID NO: 5798 - DNA, 31 bp, Artificial Sequence
  Description of Artificial Sequence:  Enzymatic Nucleic Acid
aaacagcaggctagctacaacgaaacgaact

SEQ ID NO: 5799 - DNA, 31 bp, Artificial Sequence
  Description of Artificial Sequence:  Enzymatic Nucleic Acid
agaaacagggctagctacaacgaacaacgaa

SEQ ID NO: 5800 - DNA, 31 bp, Artificial Sequence
  Description of Artificial Sequence:  Enzymatic Nucleic Acid
gtcagaaaggctagctacaacgaagcacaac

SEQ ID NO: 5801 - DNA, 31 bp, Artificial Sequence
  Description of Artificial Sequence:  Enzymatic Nucleic Acid
attaggagggctagctacaacgacagaaaca

SEQ ID NO: 5802 - DNA, 31 bp, Artificial Sequence
  Description of Artificial Sequence:  Enzymatic Nucleic Acid
aactctcaggctagctacaacgataggagtc

SEQ ID NO: 5803 - DNA, 31 bp, Artificial Sequence
  Description of Artificial Sequence:  Enzymatic Nucleic Acid
ggaaggaaggctagctacaacgatctcatta

SEQ ID NO: 5804 - DNA, 31 bp, Artificial Sequence
  Description of Artificial Sequence:  Enzymatic Nucleic Acid
gctaacggggctagctacaacgactggaagg

SEQ ID NO: 5805 - DNA, 31 bp, Artificial Sequence
  Description of Artificial Sequence:  Enzymatic Nucleic Acid
acagctaaggctagctacaacgaggtctgga

SEQ ID NO: 5806 - DNA, 31 bp, Artificial Sequence
  Description of Artificial Sequence:  Enzymatic Nucleic Acid
ggagacagggctagctacaacgataacggtc

SEQ ID NO: 5807 - DNA, 31 bp, Artificial Sequence
  Description of Artificial Sequence:  Enzymatic Nucleic Acid
caaggagaggctagctacaacgaagctaacg

SEQ ID NO: 5808 - DNA, 31 bp, Artificial Sequence
  Description of Artificial Sequence:  Enzymatic Nucleic Acid
gggcttggggctagctacaacgaaaggagac

SEQ ID NO: 5809 - DNA, 31 bp, Artificial Sequence
  Description of Artificial Sequence:  Enzymatic Nucleic Acid
tcctggggggctagctacaacgattggcaag

SEQ ID NO: 5810 - DNA, 31 bp, Artificial Sequence
  Description of Artificial Sequence:  Enzymatic Nucleic Acid
ctgcatcaggctagctacaacgatttcttcc

SEQ ID NO: 5811 - DNA, 31 bp, Artificial Sequence
  Description of Artificial Sequence:  Enzymatic Nucleic Acid
gagctgcaggctagctacaacgacattttct

SEQ ID NO: 5812 - DNA, 31 bp, Artificial Sequence
  Description of Artificial Sequence:  Enzymatic Nucleic Acid
cagagctgggctagctacaacgaatcatttt

SEQ ID NO: 5813 - DNA, 31 bp, Artificial Sequence
  Description of Artificial Sequence:  Enzymatic Nucleic Acid
agccagagggctagctacaacgatgcatcat

SEQ ID NO: 5814 - DNA, 31 bp, Artificial Sequence
  Description of Artificial Sequence:  Enzymatic Nucleic Acid
acaaggagggctagctacaacgacagagctg

SEQ ID NO: 5815 - DNA, 31 bp, Artificial Sequence
  Description of Artificial Sequence:  Enzymatic Nucleic Acid
ctgggagaggctagctacaacgaaaggagcc

SEQ ID NO: 5816 - DNA, 31 bp, Artificial Sequence
  Description of Artificial Sequence:  Enzymatic Nucleic Acid
aggatcagggctagctacaacgactgggaga

SEQ ID NO: 5817 - DNA, 31 bp, Artificial Sequence
  Description of Artificial Sequence:  Enzymatic Nucleic Acid
ataaaggaggctagctacaacgacagcctgg

SEQ ID NO: 5818 - DNA, 31 bp, Artificial Sequence
  Description of Artificial Sequence:  Enzymatic Nucleic Acid
attctgaaggctagctacaacgaaaaggatc

SEQ ID NO: 5819 - DNA, 31 bp, Artificial Sequence
  Description of Artificial Sequence:  Enzymatic Nucleic Acid
ttgtggtaggctagctacaacgatctgaata

SEQ ID NO: 5820 - DNA, 31 bp, Artificial Sequence
  Description of Artificial Sequence:  Enzymatic Nucleic Acid
ctttgtggggctagctacaacgaattctgaa

SEQ ID NO: 5821 - DNA, 31 bp, Artificial Sequence
  Description of Artificial Sequence:  Enzymatic Nucleic Acid
tttctttgggctagctacaacgaggtattct

SEQ ID NO: 5822 - DNA, 31 bp, Artificial Sequence
  Description of Artificial Sequence:  Enzymatic Nucleic Acid
gctgaatgggctagctacaacgacctttctt

SEQ ID NO: 5823 - DNA, 31 bp, Artificial Sequence
  Description of Artificial Sequence:  Enzymatic Nucleic Acid
gagctgaaggctagctacaacgagtcctttc

SEQ ID NO: 5824 - DNA, 31 bp, Artificial Sequence
  Description of Artificial Sequence:  Enzymatic Nucleic Acid
gccttgagggctagctacaacgatgaatgtc

SEQ ID NO: 5825 - DNA, 31 bp, Artificial Sequence
  Description of Artificial Sequence:  Enzymatic Nucleic Acid
gcagggagggctagctacaacgacttgagct

SEQ ID NO: 5826 - DNA, 31 bp, Artificial Sequence
  Description of Artificial Sequence:  Enzymatic Nucleic Acid
caacacggggctagctacaacgaagggagcc

SEQ ID NO: 5827 - DNA, 31 bp, Artificial Sequence
  Description of Artificial Sequence:  Enzymatic Nucleic Acid
cttcaacaggctagctacaacgaggcaggga

SEQ ID NO: 5828 - DNA, 31 bp, Artificial Sequence
  Description of Artificial Sequence:  Enzymatic Nucleic Acid
ctcttcaaggctagctacaacgaacggcagg

SEQ ID NO: 5829 - DNA, 31 bp, Artificial Sequence
  Description of Artificial Sequence:  Enzymatic Nucleic Acid
agtcagaaggctagctacaacgatcttcaac

SEQ ID NO: 5830 - DNA, 31 bp, Artificial Sequence
  Description of Artificial Sequence:  Enzymatic Nucleic Acid
ttgtgcagggctagctacaacgacagaactc

SEQ ID NO: 5831 - DNA, 31 bp, Artificial Sequence
  Description of Artificial Sequence:  Enzymatic Nucleic Acid
ggtttgtgggctagctacaacgaagtcagaa

SEQ ID NO: 5832 - DNA, 31 bp, Artificial Sequence
  Description of Artificial Sequence:  Enzymatic Nucleic Acid
ctggtttgggctagctacaacgagcagtcag

SEQ ID NO: 5833 - DNA, 31 bp, Artificial Sequence
  Description of Artificial Sequence:  Enzymatic Nucleic Acid
gaagctggggctagctacaacgattgtgcag

SEQ ID NO: 5834 - DNA, 31 bp, Artificial Sequence
  Description of Artificial Sequence:  Enzymatic Nucleic Acid
accagaagggctagctacaacgatggtttgt

SEQ ID NO: 5835 - DNA, 31 bp, Artificial Sequence
  Description of Artificial Sequence:  Enzymatic Nucleic Acid
agaagaaaggctagctacaacgacagaagct

SEQ ID NO: 5836 - DNA, 31 bp, Artificial Sequence
  Description of Artificial Sequence:  Enzymatic Nucleic Acid
ggtattcaggctagctacaacgatccagaag

SEQ ID NO: 5837 - DNA, 31 bp, Artificial Sequence
  Description of Artificial Sequence:  Enzymatic Nucleic Acid
tgagggtaggctagctacaacgatcattcca

SEQ ID NO: 5838 - DNA, 31 bp, Artificial Sequence
  Description of Artificial Sequence:  Enzymatic Nucleic Acid
tatgagggggctagctacaacgaattcattc

SEQ ID NO: 5839 - DNA, 31 bp, Artificial Sequence
  Description of Artificial Sequence:  Enzymatic Nucleic Acid
gacagataggctagctacaacgagagggtat

SEQ ID NO: 5840 - DNA, 31 bp, Artificial Sequence
  Description of Artificial Sequence:  Enzymatic Nucleic Acid
aggacagaggctagctacaacgaatgagggt

SEQ ID NO: 5841 - DNA, 31 bp, Artificial Sequence
  Description of Artificial Sequence:  Enzymatic Nucleic Acid
catcaggaggctagctacaacgaagatatga

SEQ ID NO: 5842 - DNA, 31 bp, Artificial Sequence
  Description of Artificial Sequence:  Enzymatic Nucleic Acid
atatcacaggctagctacaacgacaggacag

SEQ ID NO: 5843 - DNA, 31 bp, Artificial Sequence
  Description of Artificial Sequence:  Enzymatic Nucleic Acid
acatatcaggctagctacaacgaatcaggac

SEQ ID NO: 5844 - DNA, 31 bp, Artificial Sequence
  Description of Artificial Sequence:  Enzymatic Nucleic Acid
cagacataggctagctacaacgacacatcag

SEQ ID NO: 5845 - DNA, 31 bp, Artificial Sequence
  Description of Artificial Sequence:  Enzymatic Nucleic Acid
ctcagacaggctagctacaacgaatcacatc

SEQ ID NO: 5846 - DNA, 31 bp, Artificial Sequence
  Description of Artificial Sequence:  Enzymatic Nucleic Acid
gtctcagaggctagctacaacgaatatcaca

SEQ ID NO: 5847 - DNA, 31 bp, Artificial Sequence
  Description of Artificial Sequence:  Enzymatic Nucleic Acid
gcattcagggctagctacaacgactcagaca

SEQ ID NO: 5848 - DNA, 31 bp, Artificial Sequence
  Description of Artificial Sequence:  Enzymatic Nucleic Acid
ctcccgcaggctagctacaacgatcagtctc

SEQ ID NO: 5849 - DNA, 31 bp, Artificial Sequence
  Description of Artificial Sequence:  Enzymatic Nucleic Acid
acctcccgggctagctacaacgaattcagtc

SEQ ID NO: 5850 - DNA, 31 bp, Artificial Sequence
  Description of Artificial Sequence:  Enzymatic Nucleic Acid
acattgaaggctagctacaacgactcccgca

SEQ ID NO: 5851 - DNA, 31 bp, Artificial Sequence
  Description of Artificial Sequence:  Enzymatic Nucleic Acid
gcttcacaggctagctacaacgatgaacctc

SEQ ID NO: 5852 - DNA, 31 bp, Artificial Sequence
  Description of Artificial Sequence:  Enzymatic Nucleic Acid
cagcttcaggctagctacaacgaattgaacc

SEQ ID NO: 5853 - DNA, 31 bp, Artificial Sequence
  Description of Artificial Sequence:  Enzymatic Nucleic Acid
acacacagggctagctacaacgattcacatt

SEQ ID NO: 5854 - DNA, 31 bp, Artificial Sequence
  Description of Artificial Sequence:  Enzymatic Nucleic Acid
accacacaggctagctacaacgaagcttcac

SEQ ID NO: 5855 - DNA, 31 bp, Artificial Sequence
  Description of Artificial Sequence:  Enzymatic Nucleic Acid
acaccacaggctagctacaacgaacagcttc

SEQ ID NO: 5856 - DNA, 31 bp, Artificial Sequence
  Description of Artificial Sequence:  Enzymatic Nucleic Acid
tgacaccaggctagctacaacgaacacagct

SEQ ID NO: 5857 - DNA, 31 bp, Artificial Sequence
  Description of Artificial Sequence:  Enzymatic Nucleic Acid
ctttgacaggctagctacaacgacacacaca

SEQ ID NO: 5858 - DNA, 31 bp, Artificial Sequence
  Description of Artificial Sequence:  Enzymatic Nucleic Acid
aactttgaggctagctacaacgaaccacaca

SEQ ID NO: 5859 - DNA, 31 bp, Artificial Sequence
  Description of Artificial Sequence:  Enzymatic Nucleic Acid
tcctgaaaggctagctacaacgatttgacac

SEQ ID NO: 5860 - DNA, 31 bp, Artificial Sequence
  Description of Artificial Sequence:  Enzymatic Nucleic Acid
gggtaaaaggctagctacaacgaccttcctg

SEQ ID NO: 5861 - DNA, 31 bp, Artificial Sequence
  Description of Artificial Sequence:  Enzymatic Nucleic Acid
caaaagggggctagctacaacgaaaaatcct

SEQ ID NO: 5862 - DNA, 31 bp, Artificial Sequence
  Description of Artificial Sequence:  Enzymatic Nucleic Acid
gggaagaaggctagctacaacgaaaaagggt

SEQ ID NO: 5863 - DNA, 31 bp, Artificial Sequence
  Description of Artificial Sequence:  Enzymatic Nucleic Acid
gttggggaggctagctacaacgaagggggaa

SEQ ID NO: 5864 - DNA, 31 bp, Artificial Sequence
  Description of Artificial Sequence:  Enzymatic Nucleic Acid
agagtgggggctagctacaacgatggggaca

SEQ ID NO: 5865 - DNA, 31 bp, Artificial Sequence
  Description of Artificial Sequence:  Enzymatic Nucleic Acid
ggtgagagggctagctacaacgagggttggg

SEQ ID NO: 5866 - DNA, 31 bp, Artificial Sequence
  Description of Artificial Sequence:  Enzymatic Nucleic Acid
ttgcggggggctagctacaacgagagagtgg

SEQ ID NO: 5867 - DNA, 31 bp, Artificial Sequence
  Description of Artificial Sequence:  Enzymatic Nucleic Acid
atgggttgggctagctacaacgaggggtgag

SEQ ID NO: 5868 - DNA, 31 bp, Artificial Sequence
  Description of Artificial Sequence:  Enzymatic Nucleic Acid
ctgatgggggctagctacaacgatgcggggt

SEQ ID NO: 5869 - DNA, 31 bp, Artificial Sequence
  Description of Artificial Sequence:  Enzymatic Nucleic Acid
aatactgaggctagctacaacgagggttgcg

SEQ ID NO: 5870 - DNA, 31 bp, Artificial Sequence
  Description of Artificial Sequence:  Enzymatic Nucleic Acid
ctaaaataggctagctacaacgatgatgggt

SEQ ID NO: 5871 - DNA, 31 bp, Artificial Sequence
  Description of Artificial Sequence:  Enzymatic Nucleic Acid
aactaaaaggctagctacaacgaactgatgg

SEQ ID NO: 5872 - DNA, 31 bp, Artificial Sequence
  Description of Artificial Sequence:  Enzymatic Nucleic Acid
ccaaataaggctagctacaacgataaaatac

SEQ ID NO: 5873 - DNA, 31 bp, Artificial Sequence
  Description of Artificial Sequence:  Enzymatic Nucleic Acid
aggccaaaggctagctacaacgaaactaaaa

SEQ ID NO: 5874 - DNA, 31 bp, Artificial Sequence
  Description of Artificial Sequence:  Enzymatic Nucleic Acid
agtagaggggctagctacaacgacaaataac

SEQ ID NO: 5875 - DNA, 31 bp, Artificial Sequence
  Description of Artificial Sequence:  Enzymatic Nucleic Acid
tactggagggctagctacaacgaagaggcca

SEQ ID NO: 5876 - DNA, 31 bp, Artificial Sequence
  Description of Artificial Sequence:  Enzymatic Nucleic Acid
caggtttaggctagctacaacgatggagtag

SEQ ID NO: 5877 - DNA, 31 bp, Artificial Sequence
  Description of Artificial Sequence:  Enzymatic Nucleic Acid
caatcaggggctagctacaacgattactgga

SEQ ID NO: 5878 - DNA, 31 bp, Artificial Sequence
  Description of Artificial Sequence:  Enzymatic Nucleic Acid
aaacccaaggctagctacaacgacaggttta

SEQ ID NO: 5879 - DNA, 31 bp, Artificial Sequence
  Description of Artificial Sequence:  Enzymatic Nucleic Acid
tgaacaaaggctagctacaacgaccaatcag

SEQ ID NO: 5880 - DNA, 31 bp, Artificial Sequence
  Description of Artificial Sequence:  Enzymatic Nucleic Acid
agagtgaaggctagctacaacgaaaacccaa

SEQ ID NO: 5881 - DNA, 31 bp, Artificial Sequence
  Description of Artificial Sequence:  Enzymatic Nucleic Acid
tcagagagggctagctacaacgagaacaaac

SEQ ID NO: 5882 - DNA, 31 bp, Artificial Sequence
  Description of Artificial Sequence:  Enzymatic Nucleic Acid
aataatcaggctagctacaacgatcagagag

SEQ ID NO: 5883 - DNA, 31 bp, Artificial Sequence
  Description of Artificial Sequence:  Enzymatic Nucleic Acid
gctaataaggctagctacaacgacattcaga

SEQ ID NO: 5884 - DNA, 31 bp, Artificial Sequence
  Description of Artificial Sequence:  Enzymatic Nucleic Acid
ctggctaaggctagctacaacgaaatcattc

SEQ ID NO: 5885 - DNA, 31 bp, Artificial Sequence
  Description of Artificial Sequence:  Enzymatic Nucleic Acid
aagtctggggctagctacaacgataataatc

SEQ ID NO: 5886 - DNA, 31 bp, Artificial Sequence
  Description of Artificial Sequence:  Enzymatic Nucleic Acid
ttttgaagggctagctacaacgactggctaa

SEQ ID NO: 5887 - DNA, 31 bp, Artificial Sequence
  Description of Artificial Sequence:  Enzymatic Nucleic Acid
taaaataaggctagctacaacgatttgaagt

SEQ ID NO: 5888 - DNA, 31 bp, Artificial Sequence
  Description of Artificial Sequence:  Enzymatic Nucleic Acid
ctataaaaggctagctacaacgaaattttga

SEQ ID NO: 5889 - DNA, 31 bp, Artificial Sequence
  Description of Artificial Sequence:  Enzymatic Nucleic Acid
ttgggctaggctagctacaacgaaaaataat

SEQ ID NO: 5890 - DNA, 31 bp, Artificial Sequence
  Description of Artificial Sequence:  Enzymatic Nucleic Acid
aatttgggggctagctacaacgatataaaat

SEQ ID NO: 5891 - DNA, 31 bp, Artificial Sequence
  Description of Artificial Sequence:  Enzymatic Nucleic Acid
tgttataaggctagctacaacgattgggcta

SEQ ID NO: 5892 - DNA, 31 bp, Artificial Sequence
  Description of Artificial Sequence:  Enzymatic Nucleic Acid
agatgttaggctagctacaacgaaatttggg

SEQ ID NO: 5893 - DNA, 31 bp, Artificial Sequence
  Description of Artificial Sequence:  Enzymatic Nucleic Acid
aatagatgggctagctacaacgatataattt

SEQ ID NO: 5894 - DNA, 31 bp, Artificial Sequence
  Description of Artificial Sequence:  Enzymatic Nucleic Acid
acaatagaggctagctacaacgagttataat

SEQ ID NO: 5895 - DNA, 31 bp, Artificial Sequence
  Description of Artificial Sequence:  Enzymatic Nucleic Acid
taatacaaggctagctacaacgaagatgtta

SEQ ID NO: 5896 - DNA, 31 bp, Artificial Sequence
  Description of Artificial Sequence:  Enzymatic Nucleic Acid
aaataataggctagctacaacgaaatagatg

SEQ ID NO: 5897 - DNA, 31 bp, Artificial Sequence
  Description of Artificial Sequence:  Enzymatic Nucleic Acid
ctaaataaggctagctacaacgaacaataga

SEQ ID NO: 5898 - DNA, 31 bp, Artificial Sequence
  Description of Artificial Sequence:  Enzymatic Nucleic Acid
agtctaaaggctagctacaacgaaatacaat

SEQ ID NO: 5899 - DNA, 31 bp, Artificial Sequence
  Description of Artificial Sequence:  Enzymatic Nucleic Acid
gttaaaagggctagctacaacgactaaataa

SEQ ID NO: 5900 - DNA, 31 bp, Artificial Sequence
  Description of Artificial Sequence:  Enzymatic Nucleic Acid
tctatatgggctagctacaacgataaaagtc

SEQ ID NO: 5901 - DNA, 31 bp, Artificial Sequence
  Description of Artificial Sequence:  Enzymatic Nucleic Acid
gctctataggctagctacaacgagttaaaag

SEQ ID NO: 5902 - DNA, 31 bp, Artificial Sequence
  Description of Artificial Sequence:  Enzymatic Nucleic Acid
tagctctaggctagctacaacgaatgttaaa

SEQ ID NO: 5903 - DNA, 31 bp, Artificial Sequence
  Description of Artificial Sequence:  Enzymatic Nucleic Acid
agaaatagggctagctacaacgatctatatg

SEQ ID NO: 5904 - DNA, 31 bp, Artificial Sequence
  Description of Artificial Sequence:  Enzymatic Nucleic Acid
agtagaaaggctagctacaacgaagctctat

SEQ ID NO: 5905 - DNA, 31 bp, Artificial Sequence
  Description of Artificial Sequence:  Enzymatic Nucleic Acid
aaaatcagggctagctacaacgaagaaatag

SEQ ID NO: 5906 - DNA, 31 bp, Artificial Sequence
  Description of Artificial Sequence:  Enzymatic Nucleic Acid
ggcaaaaaggctagctacaacgacagtagaa

SEQ ID NO: 5907 - DNA, 31 bp, Artificial Sequence
  Description of Artificial Sequence:  Enzymatic Nucleic Acid
aacaagggggctagctacaacgaaaaaatca

SEQ ID NO: 5908 - DNA, 31 bp, Artificial Sequence
  Description of Artificial Sequence:  Enzymatic Nucleic Acid
ggacagaaggctagctacaacgaaagggcaa

SEQ ID NO: 5909 - DNA, 31 bp, Artificial Sequence
  Description of Artificial Sequence:  Enzymatic Nucleic Acid
aaaaaggaggctagctacaacgaagaacaag

SEQ ID NO: 5910 - DNA, 31 bp, Artificial Sequence
  Description of Artificial Sequence:  Enzymatic Nucleic Acid
aaaacacaggctagctacaacgatttctttt

SEQ ID NO: 5911 - DNA, 31 bp, Artificial Sequence
  Description of Artificial Sequence:  Enzymatic Nucleic Acid
aaaaaacaggctagctacaacgaattttctt

SEQ ID NO: 5912 - DNA, 31 bp, Artificial Sequence
  Description of Artificial Sequence:  Enzymatic Nucleic Acid
acaaaaaaggctagctacaacgaacattttc

SEQ ID NO: 5913 - DNA, 31 bp, Artificial Sequence
  Description of Artificial Sequence:  Enzymatic Nucleic Acid
gtaccaaaggctagctacaacgaaaaaaaca

SEQ ID NO: 5914 - DNA, 31 bp, Artificial Sequence
  Description of Artificial Sequence:  Enzymatic Nucleic Acid
ctatggtaggctagctacaacgacaaacaaa

SEQ ID NO: 5915 - DNA, 31 bp, Artificial Sequence
  Description of Artificial Sequence:  Enzymatic Nucleic Acid
cactatggggctagctacaacgaaccaaaca

SEQ ID NO: 5916 - DNA, 31 bp, Artificial Sequence
  Description of Artificial Sequence:  Enzymatic Nucleic Acid
tcacactaggctagctacaacgaggtaccaa

SEQ ID NO: 5917 - DNA, 31 bp, Artificial Sequence
  Description of Artificial Sequence:  Enzymatic Nucleic Acid
atttcacaggctagctacaacgatatggtac

SEQ ID NO: 5918 - DNA, 31 bp, Artificial Sequence
  Description of Artificial Sequence:  Enzymatic Nucleic Acid
gcatttcaggctagctacaacgaactatggt

SEQ ID NO: 5919 - DNA, 31 bp, Artificial Sequence
  Description of Artificial Sequence:  Enzymatic Nucleic Acid
tcccagcaggctagctacaacgattcacact

SEQ ID NO: 5920 - DNA, 31 bp, Artificial Sequence
  Description of Artificial Sequence:  Enzymatic Nucleic Acid
gttcccagggctagctacaacgaatttcaca

SEQ ID NO: 5921 - DNA, 31 bp, Artificial Sequence
  Description of Artificial Sequence:  Enzymatic Nucleic Acid
agtcattgggctagctacaacgatcccagca

SEQ ID NO: 5922 - DNA, 31 bp, Artificial Sequence
  Description of Artificial Sequence:  Enzymatic Nucleic Acid
tatagtcaggctagctacaacgatgttccca

SEQ ID NO: 5923 - DNA, 31 bp, Artificial Sequence
  Description of Artificial Sequence:  Enzymatic Nucleic Acid
tcttatagggctagctacaacgacattgttc

SEQ ID NO: 5924 - DNA, 31 bp, Artificial Sequence
  Description of Artificial Sequence:  Enzymatic Nucleic Acid
atgtcttaggctagctacaacgaagtcattg

SEQ ID NO: 5925 - DNA, 31 bp, Artificial Sequence
  Description of Artificial Sequence:  Enzymatic Nucleic Acid
atagcatgggctagctacaacgacttatagt

SEQ ID NO: 5926 - DNA, 31 bp, Artificial Sequence
  Description of Artificial Sequence:  Enzymatic Nucleic Acid
ccatagcaggctagctacaacgagtcttata

SEQ ID NO: 5927 - DNA, 31 bp, Artificial Sequence
  Description of Artificial Sequence:  Enzymatic Nucleic Acid
tgccatagggctagctacaacgaatgtctta

SEQ ID NO: 5928 - DNA, 31 bp, Artificial Sequence
  Description of Artificial Sequence:  Enzymatic Nucleic Acid
atgtgccaggctagctacaacgaagcatgtc

SEQ ID NO: 5929 - DNA, 31 bp, Artificial Sequence
  Description of Artificial Sequence:  Enzymatic Nucleic Acid
tatatgtgggctagctacaacgacatagcat

SEQ ID NO: 5930 - DNA, 31 bp, Artificial Sequence
  Description of Artificial Sequence:  Enzymatic Nucleic Acid
aatatatgggctagctacaacgagccatagc

SEQ ID NO: 5931 - DNA, 31 bp, Artificial Sequence
  Description of Artificial Sequence:  Enzymatic Nucleic Acid
taaatataggctagctacaacgagtgccata

SEQ ID NO: 5932 - DNA, 31 bp, Artificial Sequence
  Description of Artificial Sequence:  Enzymatic Nucleic Acid
tataaataggctagctacaacgaatgtgcca

SEQ ID NO: 5933 - DNA, 31 bp, Artificial Sequence
  Description of Artificial Sequence:  Enzymatic Nucleic Acid
actataaaggctagctacaacgaatatgtgc

SEQ ID NO: 5934 - DNA, 31 bp, Artificial Sequence
  Description of Artificial Sequence:  Enzymatic Nucleic Acid
acagactaggctagctacaacgaaaatatat

SEQ ID NO: 5935 - DNA, 31 bp, Artificial Sequence
  Description of Artificial Sequence:  Enzymatic Nucleic Acid
taaacagaggctagctacaacgatataaata

SEQ ID NO: 5936 - DNA, 31 bp, Artificial Sequence
  Description of Artificial Sequence:  Enzymatic Nucleic Acid
tacataaaggctagctacaacgaagactata

SEQ ID NO: 5937 - DNA, 31 bp, Artificial Sequence
  Description of Artificial Sequence:  Enzymatic Nucleic Acid
tttctacaggctagctacaacgaaaacagac

SEQ ID NO: 5938 - DNA, 31 bp, Artificial Sequence
  Description of Artificial Sequence:  Enzymatic Nucleic Acid
tgtttctaggctagctacaacgaataaacag

SEQ ID NO: 5939 - DNA, 31 bp, Artificial Sequence
  Description of Artificial Sequence:  Enzymatic Nucleic Acid
tacatttgggctagctacaacgattctacat

SEQ ID NO: 5940 - DNA, 31 bp, Artificial Sequence
  Description of Artificial Sequence:  Enzymatic Nucleic Acid
atattacaggctagctacaacgattgtttct

SEQ ID NO: 5941 - DNA, 31 bp, Artificial Sequence
  Description of Artificial Sequence:  Enzymatic Nucleic Acid
atatattaggctagctacaacgaatttgttt

SEQ ID NO: 5942 - DNA, 31 bp, Artificial Sequence
  Description of Artificial Sequence:  Enzymatic Nucleic Acid
ttaatataggctagctacaacgatacatttg

SEQ ID NO: 5943 - DNA, 31 bp, Artificial Sequence
  Description of Artificial Sequence:  Enzymatic Nucleic Acid
ctttaataggctagctacaacgaattacatt

SEQ ID NO: 5944 - DNA, 31 bp, Artificial Sequence
  Description of Artificial Sequence:  Enzymatic Nucleic Acid
ggctttaaggctagctacaacgaatattaca

SEQ ID NO: 5945 - DNA, 31 bp, Artificial Sequence
  Description of Artificial Sequence:  Enzymatic Nucleic Acid
atataaggggctagctacaacgatttaatat

SEQ ID NO: 5946 - DNA, 31 bp, Artificial Sequence
  Description of Artificial Sequence:  Enzymatic Nucleic Acid
attatataggctagctacaacgaaaggcttt

SEQ ID NO: 5947 - DNA, 31 bp, Artificial Sequence
  Description of Artificial Sequence:  Enzymatic Nucleic Acid
tcattataggctagctacaacgaataaggct

SEQ ID NO: 5948 - DNA, 31 bp, Artificial Sequence
  Description of Artificial Sequence:  Enzymatic Nucleic Acid
gttcattaggctagctacaacgaatataagg

SEQ ID NO: 5949 - DNA, 31 bp, Artificial Sequence
  Description of Artificial Sequence:  Enzymatic Nucleic Acid
aaagttcaggctagctacaacgatatatata

SEQ ID NO: 5950 - DNA, 31 bp, Artificial Sequence
  Description of Artificial Sequence:  Enzymatic Nucleic Acid
gtacaaagggctagctacaacgatcattata

SEQ ID NO: 5951 - DNA, 31 bp, Artificial Sequence
  Description of Artificial Sequence:  Enzymatic Nucleic Acid
gaatagtaggctagctacaacgaaaagttca

SEQ ID NO: 5952 - DNA, 31 bp, Artificial Sequence
  Description of Artificial Sequence:  Enzymatic Nucleic Acid
gtgaatagggctagctacaacgaacaaagtt

SEQ ID NO: 5953 - DNA, 31 bp, Artificial Sequence
  Description of Artificial Sequence:  Enzymatic Nucleic Acid
aatgtgaaggctagctacaacgaagtacaaa

SEQ ID NO: 5954 - DNA, 31 bp, Artificial Sequence
  Description of Artificial Sequence:  Enzymatic Nucleic Acid
acaaaatgggctagctacaacgagaatagta

SEQ ID NO: 5955 - DNA, 31 bp, Artificial Sequence
  Description of Artificial Sequence:  Enzymatic Nucleic Acid
atacaaaaggctagctacaacgagtgaatag

SEQ ID NO: 5956 - DNA, 31 bp, Artificial Sequence
  Description of Artificial Sequence:  Enzymatic Nucleic Acid
tactgataggctagctacaacgaaaaatgtg

SEQ ID NO: 5957 - DNA, 31 bp, Artificial Sequence
  Description of Artificial Sequence:  Enzymatic Nucleic Acid
aatactgaggctagctacaacgaacaaaatg

SEQ ID NO: 5958 - DNA, 31 bp, Artificial Sequence
  Description of Artificial Sequence:  Enzymatic Nucleic Acid
acataataggctagctacaacgatgatacaa

SEQ ID NO: 5959 - DNA, 31 bp, Artificial Sequence
  Description of Artificial Sequence:  Enzymatic Nucleic Acid
ctacataaggctagctacaacgaactgatac

SEQ ID NO: 5960 - DNA, 31 bp, Artificial Sequence
  Description of Artificial Sequence:  Enzymatic Nucleic Acid
atgctacaggctagctacaacgaaatactga

SEQ ID NO: 5961 - DNA, 31 bp, Artificial Sequence
  Description of Artificial Sequence:  Enzymatic Nucleic Acid
ttatgctaggctagctacaacgaataatact

SEQ ID NO: 5962 - DNA, 31 bp, Artificial Sequence
  Description of Artificial Sequence:  Enzymatic Nucleic Acid
ttgttatgggctagctacaacgatacataat

SEQ ID NO: 5963 - DNA, 31 bp, Artificial Sequence
  Description of Artificial Sequence:  Enzymatic Nucleic Acid
ctttgttaggctagctacaacgagctacata

SEQ ID NO: 5964 - DNA, 31 bp, Artificial Sequence
  Description of Artificial Sequence:  Enzymatic Nucleic Acid
gacctttgggctagctacaacgatatgctac

SEQ ID NO: 5965 - DNA, 31 bp, Artificial Sequence
  Description of Artificial Sequence:  Enzymatic Nucleic Acid
cattatgaggctagctacaacgactttgtta

SEQ ID NO: 5966 - DNA, 31 bp, Artificial Sequence
  Description of Artificial Sequence:  Enzymatic Nucleic Acid
aagcattaggctagctacaacgagacctttg

SEQ ID NO: 5967 - DNA, 31 bp, Artificial Sequence
  Description of Artificial Sequence:  Enzymatic Nucleic Acid
tgaaagcaggctagctacaacgatatgacct

SEQ ID NO: 5968 - DNA, 31 bp, Artificial Sequence
  Description of Artificial Sequence:  Enzymatic Nucleic Acid
gctgaaagggctagctacaacgaattatgac

SEQ ID NO: 5969 - DNA, 31 bp, Artificial Sequence
  Description of Artificial Sequence:  Enzymatic Nucleic Acid
atcaattgggctagctacaacgatgaaagca

SEQ ID NO: 5970 - DNA, 31 bp, Artificial Sequence
  Description of Artificial Sequence:  Enzymatic Nucleic Acid
gacatcaaggctagctacaacgatgctgaaa

SEQ ID NO: 5971 - DNA, 31 bp, Artificial Sequence
  Description of Artificial Sequence:  Enzymatic Nucleic Acid
aaatgacaggctagctacaacgacaattgct

SEQ ID NO: 5972 - DNA, 31 bp, Artificial Sequence
  Description of Artificial Sequence:  Enzymatic Nucleic Acid
taaaatgaggctagctacaacgaatcaattg

SEQ ID NO: 5973 - DNA, 31 bp, Artificial Sequence
  Description of Artificial Sequence:  Enzymatic Nucleic Acid
taataaaaggctagctacaacgagacatcaa

SEQ ID NO: 5974 - DNA, 31 bp, Artificial Sequence
  Description of Artificial Sequence:  Enzymatic Nucleic Acid
ttctttaaggctagctacaacgaaaaatgac

SEQ ID NO: 5975 - DNA, 31 bp, Artificial Sequence
  Description of Artificial Sequence:  Enzymatic Nucleic Acid
tttcaatgggctagctacaacgatctttaat

SEQ ID NO: 5976 - DNA, 31 bp, Artificial Sequence
  Description of Artificial Sequence:  Enzymatic Nucleic Acid
tttttcaaggctagctacaacgagttcttta

SEQ ID NO: 5977 - RNA, 34 nt, Artificial Sequence
  Description of Artificial Sequence:  Enzymatic Nucleic Acid
  misc_feature (1)..(4): Phosphorothioate 3'-Internucleotide Linkage
  misc_feature (1)..(7): 2'-O-Methyl
  misc_feature (11)..(11): 2'-O-Methyl
  misc_feature (13)..(25): 2'-O-Methyl
  misc_feature (27)..(28): 2'-O-Methyl
  misc_feature (30)..(34): 2'-O-Methyl
  misc_feature (8)..(8): 2'-deoxy-2'-C-Allyl
  misc_feature (34)..(34): 3'-end phosphate attached to an inverted deoxyabasic moiety, in a 3'-3 orientation
gaguugcugaugaggccgaaaggccgaaagucug

SEQ ID NO: 5978 - RNA, 34 nt, Artificial Sequence
  Description of Artificial Sequence:  Enzymatic Nucleic Acid
  misc_feature (1)..(4): Phosphorothioate 3'-Internucleotide Linkage
  misc_feature (1)..(8): 2'-O-Methyl
  misc_feature (12)..(12): 2'-O-Methyl
  misc_feature (14)..(24): 2'-O-Methyl
  misc_feature (26)..(27): 2'-O-Methyl
  misc_feature (29)..(34): 2'-O-Methyl
  misc_feature (9)..(9): 2'-deoxy-2'-C-Allyl
  misc_feature (34)..(34): 3'-end phosphate attached to an inverted deoxyabasic moiety, in a 3'-3 orientation
uacaauucugaugaggcgaaagccgaaaagacaa

SEQ ID NO: 5979 - RNA, 10 nt, Artificial Sequence
  Description of Artificial Sequence:  Exemplary Stem II sequence
gccguuaggc

SEQ ID NO: 5980 - RNA, 13 nt, Homo Sapiens
cagacuacaacuc

SEQ ID NO: 5981 - RNA, 15 nt, Artificial Sequence
  Description of Artificial Sequence:  Nucleic Acid Substrate
  misc_feature (1)..(6): n stands for a, c, g, or u
  misc_feature (9)..(15): n stands for a, c, g, or u
nnnnnnuhnnnnnnn

SEQ ID NO: 5982 - RNA, 36 nt, Artificial Sequence
  Description of Artificial Sequence:  Enzymatic Nucleic Acid
  misc_feature (1)..(7): n stands for a, c, g, or u
  misc_feature (16)..(18): n stands for a, c, g, or u
  misc_feature (23)..(25): n stands for a, c, g, or u
  misc_feature (31)..(36): n stands for a, c, g, or u
  misc_feature (1)..(8): 2'-O-Methyl
  misc_feature (12)..(12): 2'-O-Methyl
  misc_feature (14)..(26): 2'-O-Methyl
  misc_feature (28)..(29): 2'-O-Methyl
  misc_feature (31)..(36): 2'-O-Methyl
  misc_feature (9)..(9): 2'-deoxy-2'-C-Allyl
nnnnnnncugaugagnnngaaannncgaaannnnnn

SEQ ID NO: 5983 - RNA, 14 nt, Artificial Sequence
  Description of Artificial Sequence:  Nucleic Acid Substrate
  misc_feature (1)..(5): n stands for a, c, g, or u
  misc_feature (8)..(14): n stands for a, c, g, or u
nnnnnchnnnnnnn

SEQ ID NO: 5984 - RNA, 35 nt, Artificial Sequence
  Description of Artificial Sequence:  Enzymatic Nucleic Acid
  misc_feature (1)..(7): n stands for a, c, g, or u
  misc_feature (16)..(18): n stands for a, c, g, or u
  misc_feature (23)..(25): n stands for a, c, g, or u
  misc_feature (31)..(35): n stands for a, c, g, or u
  misc_feature (1)..(8): 2'-O-Methyl
  misc_feature (12)..(12): 2'-O-Methyl
  misc_feature (14)..(26): 2'-O-Methyl
  misc_feature (28)..(29): 2'-O-Methyl
  misc_feature (31)..(35): 2'-O-Methyl
  misc_feature (30)..(30): n stands for Inosine
  misc_feature (9)..(9): 2'-deoxy-2'-C-Allyl
nnnnnnncugaugagnnngaaannncgaannnnnn

SEQ ID NO: 5985 - RNA, 15 nt, Artificial Sequence
  Description of Artificial Sequence:  Nucleic Acid Substrate
  misc_feature (1)..(6): n stands for a, c, g, or u
  misc_feature (9)..(15): n stands for a, c, g, or u
nnnnnnygnnnnnnn

SEQ ID NO: 5986 - RNA, 35 nt, Artificial Sequence
  Description of Artificial Sequence:  Enzymatic Nucleic Acid
  misc_feature (1)..(7): n stands for a, c, g, or u
  misc_feature (29)..(35): n stands for a, c, g, or u
  misc_feature (1)..(8): 2'-O-Methyl
  misc_feature (13)..(16): 2'-O-Methyl
  misc_feature (18)..(35): 2'-O-Methyl
  misc_feature (11)..(11): Phosphorothioate 3'-Internucleotide Linkage
nnnnnnnugauggcaugcacuaugcgcgnnnnnnn

SEQ ID NO: 5987 - RNA, 35 nt, Artificial Sequence
  Description of Artificial Sequence:  Enzymatic Nucleic Acid
  misc_feature (1)..(7): 2'-O-Methyl
  misc_feature (9)..(15): 2'-O-Methyl
  misc_feature (19)..(19): 2'-O-Methyl
  misc_feature (21)..(21): 2'-O-Methyl
  misc_feature (23)..(23): 2'-O-Methyl
  misc_feature (26)..(26): 2'-O-Methyl
  misc_feature (28)..(35): 2'-O-Methyl
  misc_feature (1)..(4): Phosphorothioate 3'-Internucleotide Linkage
  misc_feature (17)..(17): 2'-Deoxy-2'-Amino
  misc_feature (27)..(27): 2'-Deoxy-2'-Amino
  misc_feature (35)..(35): 3'-end phosphate attached to an inverted deoxyabasic moiety, in a 3'-3 orientation
gugccuggccgaaaggcgagugaggucugccgcgc

SEQ ID NO: 5988 - RNA, 15 nt, Homo sapiens
gcgcggcgcaggcac

SEQ ID NO: 5989 - DNA, 16 bp, Artificial Sequence
  Description of Artificial Sequence:  Enzymatic Nucleic Acid
rggctagctacaacga

What we claim is:

1. A double stranded short interfering RNA (siRNA) molecule that comprises a first nucleotide sequence complementary to RNA sequence encoding vascular endothelial growth factor receptor 2 (VEGFR2) or a portion thereof, and a second sequence having complementarity to said first sequence, wherein said first sequence and said second sequence independently comprise from about 19 nucleotides to about 23 nucleotides, and wherein said siRNA molecule includes at least one nucleotide that is not a 2′-OH containing ribonucleotide.

2. The siRNA molecule of claim 1, wherein said first sequence and said second sequence of said siRNA molecule each comprise about 21 nucleotides.

3. The siRNA molecule of claim 1, wherein said first sequence and said second sequence of said siRNA molecule each comprise about 19 nucleotides.

4. The siRNA molecule of claim 1, wherein said siRNA molecule comprises a nucleotide overhang at the 3′-end, 5′-end, or both 3′ and 5′ ends of said siRNA molecule.

5. The siRNA molecule of claim 1, wherein said siRNA molecule does not comprise a nucleotide overhang.

6. The siRNA molecule of claim 1, wherein said siRNA molecule is chemically synthesized.

7. The siRNA molecule of claim 1, wherein said siRNA molecule includes at least one 2′-deoxy (2′-H) nucleotide.

8. The siRNA molecule of claim 1, wherein said siRNA molecule includes at least one 2′-deoxy-2′-fluoro (2′-F) nucleotide.

9. The siRNA molecule of claim 1, wherein said siRNA molecule includes at least one 2′-O-alkyl nucleotide.

10. The siRNA molecule of claim 9, wherein said 2′-O-alkyl nucleotide is a 2′-O-methyl nucleotide.

11. The siRNA molecule of claim 9, wherein said 2′-O-alkyl nucleotide is a 2′-O-allyl nucleotide.

12. The siRNA molecule of claim 1, wherein said siRNA molecule comprises at least one nucleic acid base modification.

13. The siRNA molecule of claim 1, wherein said siRNA molecule comprises at least one nucleic acid backbone modification.

14. The siRNA molecule of claim 1, wherein said siRNA molecule comprises at least one non-nucleotide.

15. The siRNA molecule of claim 14, wherein said non-nucleotide comprises an abasic moiety.

16. The siRNA molecule of claim 15, wherein said abasic moiety is present at the 3′-end, 5′-end, or both 3′ and 5′-ends of said first and/or said second sequence.

17. A composition comprising the siRNA of claim 1 in a pharmaceutically acceptable carrier or diluent.
